(19) United States
(12) Patent Application Publication
(10) Pub. No.: US 2022/0033899 A1
(43) Pub. Date: Feb. 3, 2022

(54) SCREENING OF GERMPLASM FOR DESIRED POLYMORPHISMS BY ASSAYS TESTED ON SYNTHETIC DNA

(71) Applicant: KWS SAAT SE & Co. KGaA, Einbeck (DE)

(72) Inventors: Olaf CZARNECKI, Berlin (DE); Sandra HABEKOST, Dassel (DE); Monika KLOIBER-MAITZ, Einbeck (DE); Silke WIECKHORST, Einbeck (DE)

(73) Assignee: KWS SAAT SE & Co. KGaA, Einbeck (DE)

(21) Appl. No.: 17/296,354

(22) PCT Filed: Nov. 30, 2019
(86) PCT No.: PCT/EP2019/083199

§ 371 Date: May 24, 2021

(30) Foreign Application Priority Data
Nov. 30, 2018 (EP) 18209559.6

(51) Int. Cl. C12Q 1/6876; C12Q 1/6813; C12Q 1/6858

(52) U.S. Cl. CPC C12Q 1/6876; C12Q 2600/156; C12Q 1/6858; C12Q 1/6813

(57) ABSTRACT

The present invention relates to methods for identifying desired allelic variations in a population, for selecting individuals comprising a desired allelic variation, as well as methods for generating individuals comprising a desired allelic variation. These methods include the use synthetic oligonucleotides to optimize or validate detection assays.

### FIELD OF THE INVENTION

[0001] The invention relates to methods for generating, identifying, and/or selecting plants having a particular genotype, such as a particular desired polymorphism.

### BACKGROUND OF THE INVENTION

[0002] Plant breeding requires variation in allele composition of germplasm. Variation can be of natural origin based on natural mutation or can be induced by physical or chemical mutation of germplasm. It can also be generated by molecular biology techniques such as transgenic or gene editing approaches. In contrast to the latter molecular bio-techniques, natural and induced mutations occur randomly, mostly heterozygous and it cannot be predicted which individual carries a desired polymorphism or mutation.

[0003] Generally, DNA polymorphisms can be detected by a set of different molecular techniques, e.g. PCR-based, hybridization-based or sequencing. Except for sequencing these techniques require prior knowledge of the polymorphism to develop polymorphism specific detection assays. Sequencing, however, targeted or next generation sequencing (NGS) are both, labour intensive, costly and not compatible with high-throughput approaches. Especially, NGS performed in high-throughput experiments would additionally require large investments in bioinformatics infrastructure.

[0004] Growing knowledge of functions of specific genes in plants leads to the requirement to identify varying alleles of such target genes. Desired allele effects can range from amino acid exchanges to gene knock-outs as well as polymorphisms in regulatory elements like promoters and cis- and trans-acting elements. Such polymorphisms and their effects can be designed in-silica. However, subsequent screen of plant germplasm for such desired mutations is hampered by both, high cost and relatively low throughput. For example, to find a specific single DNA base mutation in a crop that has been induced by chemical mutagenesis (e.g. with ethyl methanesulfonate (EMS) or

[0005] N-ethyl-N-nitrosourea (ENU)), several millions of mutagenized plants must be screened to find the desired germplasm. If screening cannot be done phenotypically, e.g. because there is no phenotypic assay available or even more likely, there is no visible phenotype, screens must be performed on DNA level. Sequencing millions of individuals is not an option in most cases, due to the high cost and low throughput.

[0006] Techniques that are cheaper and can be used in high-throughput suffer the problem that suitable detection assays cannot be tested if the germplasm carrying the desired specific mutation is not present or existing, respectively. Using untested assays to screen millions of plant genomes is unfeasible.

[0007] Accordingly, there is a pressing need to provide improved methods for identifying particular mutations, in particular in high throughput settings. The present invention has the objective to solve this problem.

### SUMMARY OF THE INVENTION

[0008] The presented invention combines use of relatively cheap and established methods to detect DNA polymorphisms, e.g. KASP markers and microarray-based DNA markers, and previous development of necessary assays on synthetic DNA fragments. It is not limited to DNA marker systems mentioned above but to all past and future methods that detect allelic variation within one DNA sample and where the detection system relies on known DNA polymorphisms. It avoids the use of genotyping systems, e.g. genotyping by sequencing, where the genotyping assays create de novo knowledge about variation.

[0009] Synthetic DNA fragments used to develop such marker assays can be two complementary oligonucleotides designed in silico, preferably of up to 120 bp, comprising the DNA polymorphism or mutation and left and right flanking sequences long enough to serve as a template DNA molecule for the respective marker assay. The oligonucleotides cover the region of the fragment amplified by the used marker assay and allow the assay to be validated on actual DNA carrying the desired polymorphism.

[0010] This invention can be used whenever DNA marker assays for DNA polymorphisms have to be developed without having the actual DNA polymorphisms in stock or present. This is of particular interest, if large numbers of genotypes need to be screened for specific DNA polymorphisms, e.g. mutant populations and there is a desire to avoid labour intensive and expensive partial or whole genome sequencing.

[0011] In an aspect, the invention relates to a method, such as a method for identifying a (desired) allelic variation in a population or a method for selecting an individual comprising a (desired) allelic variation, comprising providing one or more synthetic oligonucleotide comprising a (desired) allelic variation; providing an assay suitable for detecting said (desired) allelic variation; optimizing or validating said assay to ensure that the assay detects said (desired) allelic variation or discriminates between said (desired) allelic variation and a different allelic variation with said synthetic oligonucleotide(s) as a template; and screening the population for the presence of said (desired) allelic variation with said optimized or validated detection assay. Optionally, the method further comprises selecting an individual or individuum comprising said (desired) allelic variation.

[0012] In an aspect, the invention relates to a method for generating an individual comprising a (desired) allelic variation in a population, comprising: providing a population; mutagenizing said population; providing one or more synthetic oligonucleotide comprising said (desired) allelic variation; providing an assay suitable for detecting said (desired) allelic variation; optimizing or validating said assay to ensure that the assay detects said (desired) allelic variation or discriminates between said (desired) allelic variation and a different allelic variation with said synthetic oligonucleotide(s) as a template; screening said mutagenized population for the presence of said (desired) allelic variation with said optimized or validated detection assay; selecting an individual comprising said (desired) allelic variation; optionally propagating said individual.

[0013] In an aspect, the invention relates to a synthetic oligonucleotide suitable for use in the methods described above.

[0014] In an aspect, the invention relates to detection assay suitable for use in the methods described above.

[0015] In an aspect, the invention relates to an allele specific primer or probe suitable for use in the methods described above.

[0016] In an aspect, the invention relates to use of a synthetic oligonucleotide comprising a (desired) allelic variation for optimizing or validating an assay for detecting said allelic variation in a population.

[0017] In an aspect, the invention relates to an individual selected or generated by the methods described above.

### BRIEF DESCRIPTION OF THE FIGURES

[0018] FIG. 1: CLUSTAL O (1.2.4) multiple sequence alignment showing the annealing sites of the KASP markers (SEQ ID NOs: 17 and 18) for detection of mutant alleles. Alignment shows only a part of the BvEPSPS gene sequence (SEQ ID NO: 1) from nucleotides 3001 to 3180. Positions where C→T exchanges are desired, are marked with white letter on black background. KASP markers are designed in order to be able to detect C or T (indicated by Y, which can be C or T).

[0019] FIG. 2: CLUSTAL O (1.2.4) multiple sequence alignment showing the annealing sites of the KASP markers (SEQ ID NOs: 23, 25, 27, 29, 31, 33, 33, 35, 37, 39, 41) for detection of mutant alleles. Alignment shows only a part of the ZmPolTheta gene sequence (SEQ ID NO: 6) from nucleotides 1 to 1020. Positions where C→T exchanges are desired, are marked with white letter on black background. KASP markers are designed in order to be able to detect C or T (indicated by Y, which can be C or T).

### DETAILED DESCRIPTION OF THE INVENTION

[0020] Before the present system and method of the invention are described, it is to be understood that this invention is not limited to particular systems and methods or combinations described, since such systems and methods and combinations may, of course, vary. It is also to be understood that the terminology used herein is not intended to be limiting, since the scope of the present invention will be limited only by the appended claims.

[0021] As used herein, the singular forms “a”, “an”, and “the” include both singular and plural referents unless the context clearly dictates otherwise.

[0022] The terms “comprising”, “comprises” and “comprised of” as used herein are synonymous with “including”, “includes” or “containing”, “contains”, and are inclusive or open-ended and do not exclude additional, non-recited members, elements or method steps. It will be appreciated that the terms “comprising”, “comprises” and “comprised of” as used herein comprise the terms “consisting of”, “consists” and “consists of”, as well as the terms “consisting essentially of”, “consists essentially” and “consists essentially of”.

[0023] The recitation of numerical ranges by endpoints includes all numbers and fractions subsumed within the respective ranges, as well as the recited endpoints.

[0024] The term “about” or “approximately” as used herein when referring to a measurable value such as a parameter, an amount, a temporal duration, and the like, is meant to encompass variations of +/−20% or less, preferably +/−10% or less, more preferably +/−5% or less, and still more preferably +/−1% or less of and from the specified value, insofar such variations are appropriate to perform in the disclosed invention. It is to be understood that the value to which the modifier “about” or “approximately” refers is itself also specifically, and preferably, disclosed.

[0025] Whereas the terms “one or more” or “at least one”, such as one or more or at least one member(s) of a group of members, is clear per se, by means of further exemplification, the term encompasses inter alia a reference to any one of said members, or to any two or more of said members, such as, e.g., any ≥3, ≥4, ≥5, ≥6 or ≥7 etc. of said members, and up to all said members.

[0026] All references cited in the present specification are hereby incorporated by reference in their entirety. In particular, the teachings of all references herein specifically referred to are incorporated by reference.

[0027] Unless otherwise defined, all terms used in disclosing the invention, including technical and scientific terms, have the meaning as commonly understood by one of ordinary skill in the art to which this invention belongs. By means of further guidance, term definitions are included to better appreciate the teaching of the present invention.

[0028] Standard reference works setting forth the general principles of recombinant DNA technology include Molecular Cloning: A Laboratory Manual, 2nd ed., vol. 1-3, ed. Sambrook et al., Cold Spring Harbor Laboratory Press, Cold Spring Harbor, N.Y., 1989; Current Protocols in Molecular Biology, ed. Ausubel et al., Greene Publishing and Wiley-Interscience, New York, 1992 (with periodic updates) (“Ausubel et al. 1992”); the series Methods in Enzymology (Academic Press, Inc.); Innis et al., PCR Protocols: A Guide to Methods and Applications, Academic Press: San Diego, 1990; PCR 2: A Practical Approach (M. J. MacPherson, B. D. Hames and G. R. Taylor eds. (1995); Harlow and Lane, eds. (1988) Antibodies, a Laboratory Manual; and Animal Cell Culture (R. I. Freshney, ed. (1987). General principles of microbiology are set forth, for example, in Davis, B. D. et al., Microbiology, 3rd edition, Harper & Row, publishers, Philadelphia, Pa. (1980).

[0029] In the following passages, different aspects of the invention are defined in more detail. Each aspect so defined may be combined with any other aspect or aspects unless clearly indicated to the contrary. In particular, any feature indicated as being preferred or advantageous may be combined with any other feature or features indicated as being preferred or advantageous.

[0030] Reference throughout this specification to “one embodiment” or “an embodiment” means that a particular feature, structure or characteristic described in connection with the embodiment is included in at least one embodiment of the present invention. Thus, appearances of the phrases “in one embodiment” or “in an embodiment” in various places throughout this specification are not necessarily all referring to the same embodiment, but may. Furthermore, the particular features, structures or characteristics may be combined in any suitable manner, as would be apparent to a person skilled in the art from this disclosure, in one or more embodiments. Furthermore, while some embodiments described herein include some but not other features included in other embodiments, combinations of features of different embodiments are meant to be within the scope of the invention, and form different embodiments, as would be understood by those in the art. For example, in the appended claims, any of the claimed embodiments can be used in any combination.

[0031] In the following detailed description of the invention, reference is made to the accompanying drawings that form a part hereof, and in which are shown by way of illustration only of specific embodiments in which the invention may be practiced. It is to be understood that other embodiments may be utilised and structural or logical changes may be made without departing from the scope of the present invention. The following detailed description, therefore, is not to be taken in a limiting sense, and the scope of the present invention is defined by the appended claims.

[0032] Preferred statements (features) and embodiments of this invention are set herein below. Each statements and embodiments of the invention so defined may be combined with any other statement and/or embodiments unless clearly indicated to the contrary. In particular, any feature indicated as being preferred or advantageous may be combined with any other feature or features or statements indicated as being preferred or advantageous. Hereto, the present invention is in particular captured by any one or any combination of one or more of the below numbered aspects and statements 1 to 52, with any other statement and/or embodiments.
[0033] 1—Method for identifying a (desired) allelic variation in a population or for selecting an individuum comprising a desired allelic variation, comprising: providing one or more synthetic oligonucleotide comprising a (desired) allelic variation; providing an assay suitable for detecting said (desired) allelic variation; optimizing and/or validating said assay to ensure that the assay detects said (desired) allelic variation or discriminates between said (desired) allelic variation and a different allelic variation with said synthetic oligonucleotide(s) as a template; screening a population for the presence of said (desired) allelic variation with said optimized or validated detection assay.
[0034] 2—Method (according to statement 1) for identifying a (desired) allelic variation in a population, comprising: providing one or more synthetic oligonucleotide comprising said (desired) allelic variation; providing an assay suitable for detecting said (desired) allelic variation; optimizing and/or validating said assay to ensure that the assay detects said (desired) allelic variation or discriminates between said (desired) allelic variation and a different allelic variation with said synthetic oligonucleotide(s) as a template; screening said population for the presence of said (desired) allelic variation with said optimized or validated detection assay.
[0035] 3—Method (according to statement 1) for selecting an individuum comprising a (desired) allelic variation in a population, comprising: providing one or more synthetic oligonucleotide comprising said (desired) allelic variation; providing an assay suitable for detecting said (desired) allelic variation; optimizing and/or validating said assay to ensure that the assay detects said (desired) allelic variation or discriminates between said (desired) allelic variation and a different allelic variation with said synthetic oligonucleotide(s) as a template; screening said population for the presence of said (desired) allelic variation with said optimized or validated detection assay; selecting an individuum comprising said (desired) allelic variation.
[0036] 4—Method (according to statement 1) for generating an individuum comprising a (desired) allelic variation in a population, comprising: providing a population; mutagenizing said population; providing one or more synthetic oligonucleotide comprising said (desired) allelic variation; providing an assay suitable for detecting said (desired) allelic variation; optimizing and/or validating said assay to ensure that the assay detects said (desired) allelic variation or discriminates between said (desired) allelic variation and a different allelic variation with said synthetic oligonucleotide(s) as a template; screening said mutagenized population for the presence of said (desired) allelic variation with said optimized or validated detection assay; selecting an individuum comprising said (desired) allelic variation; optionally propagating said individuum.
[0037] 5—The method according to statement 4, comprising propagating said individuum so as to obtain said (desired) allelic variation homozygous.
[0038] 6—The method according to any of statements 1 to 5, wherein said assay is a hybridization-based assay or a PCR-based assay.
[0039] 7—The method according to any of statements 1 to 6, wherein said assay is KASP.
[0040] 8—The method according to any of statements 1 to 6, wherein said assay is a microarray.
[0041] 9—The method according to any of statements 1 to 8, wherein said assay does not comprises sequencing.
[0042] 10—The method according to any of statements 1 to 9, wherein optimizing said assay comprises comparing multiple primers or probes.
[0043] 11—The method according to any of statements 1 to 10, wherein the optimized assay comprises primers or probes which best discriminate between said (desired) allelic variation and said other allelic variation.
[0044] 12—The method according to any of statements 1 to 11, wherein said synthetic oligonucleotide has a length of between 50 and 500 nucleotides, preferably between 80 and 200 nucleotides.
[0045] 13—The method according to any of statements 1 to 12, wherein said synthetic oligonucleotide comprises said mutation and 5′ and 3′ flanking wild type sequences.
[0046] 14—The method according to any of statements 1 to 13, wherein said (desired) allelic variation is not naturally present in said population.
[0047] 15—The method according to any of statements 1 to 14, wherein said synthetic oligonucleotide is double-stranded.
[0048] 16—The method according to any of statements 1 to 15, wherein said synthetic oligonucleotide comprising said (desired) allelic variation is combined with one or more additional synthetic oligonucleotides comprising a different allelic variation.
[0049] 17—The method according to statement 12, wherein said different allelic variation is a wild type allele, endogenous allele, native allele, and/or naturally occurring allele.
[0050] 18—The method according to any of statements 16 to 17, wherein said different allelic variation is naturally present in said population.
[0051] 19—The method according to any of statements 1 to 18, wherein said synthetic oligonucleotide is spiked in genomic DNA.
[0052] 20—The method according to statement 19, wherein said genomic DNA is wild type genomic DNA.
[0053] 21—The method according to any of statements 19 to 20, wherein said genomic DNA originates from the same species as the population.
[0054] 22—The method according to any of statements 1 to 21, wherein said population is mutagenized.
[0055] 23—The method according to statement 22, wherein said mutagenized population is obtained by random mutagenesis.
[0056] 24—The method according to any of statements 22 to 23, wherein said mutagenesis is ENU or EMS based mutagenesis.
[0057] 25—The method according to any of statements 1 to 24, wherein said allelic variation is a mutation.
[0058] 26—The method according to statement 25, wherein said mutation is a point mutation.
[0059] 27—The method according to any of statements 25 to 26, wherein said mutation is a nonsense mutation.
[0060] 28—The method according to any of statements 25 to 27, wherein said mutation is a knockout mutation.
[0061] 29—The method according to any of statements 1 to 28, wherein said allelic variation is a SNP.
[0062] 30—The method according to any of statements 1 to 29, wherein said population is a population of plants or plant parts.
[0063] 31—The method according to statement 30, wherein said plant part is a plant organ or plant cell.
[0064] 32—The method according to any of statements 30 to 31, wherein said plant part is a seed.
[0065] 33—The method according to any of statements 1 to 32, wherein: said population is a population of sugar beets; said synthetic oligonucleotide comprises the sequence of SEQ ID NO: 19 or 20, or a fragment thereof comprising the sequence of SEQ ID NO: 51 or SEQ ID NO: 52.
[0066] 34—The method according to any of statements 1 to 32, wherein: said population is a population of maize; said synthetic oligonucleotide comprises the sequence of SEQ ID NO: 42 or 43, or a fragment thereof comprising the sequence of SEQ ID NO: 53 or SEQ ID NO: 54.
[0067] 35—A synthetic oligonucleotide suitable for use in the method according to any of statements 1 to 34.
[0068] 36—The synthetic oligonucleotide according to statement 35, wherein said oligonucleotide comprises the sequence of SEQ ID NO: 19 or 20, or a fragment thereof comprising the sequence of SEQ ID NO: 51 or SEQ ID NO: 52.
[0069] 37—The synthetic oligonucleotide according to statement 35, wherein said oligonucleotide comprises the sequence of SEQ ID NO: 42 or 43, or a fragment thereof comprising the sequence of SEQ ID NO: 53 or SEQ ID NO: 54.
[0070] 38—A detection assay suitable for use in the method according to any of statements 1 to 34.
[0071] 39—The detection assay according to statement 38, comprising one or more primers or probes as defined in statement 11.
[0072] 40—An allele specific primer or probe suitable for use in the method according to any of statements 1 to 34.
[0073] 41—The allele specific primer according to statement 36, which is a KASP primer.
[0074] 42—Use of a synthetic oligonucleotide comprising a (desired) allelic variation for optimizing or validating an assay for detecting said allelic variation in a population.
[0075] 43—An individuum selected or generated by the method according to any of statements 3 to 34, preferably wherein said individuum is a plant.
[0076] 44—A part, seed or progeny of the plant of statement 43, wherein the part, seed or progeny exhibit the (desired) allelic variation.
[0077] 45—A maize plant or plant part having a mutation in the polymerase theta gene.
[0078] 46—The maize plant or plant part according to statement 45, wherein said mutation is a nonsense mutation.
[0079] 47—The maize plant or plant part according to any of statements 45 to 46 wherein said mutation is homozygous or heterozygous.
[0080] 48—The maize plant or plant part according to any of statements 45 to 47, comprising any one or more of SEQ ID NOs: 23, 25, 27, 29, 31, 33, 35, 37, 39, or 41, preferably wherein Y is T.
[0081] 49—A sugar beet plant or plant part having a mutation in the epsps gene.
[0082] 50—The sugar beet plant or plant part according to statement 49, wherein said mutation is a SNP.
[0083] 51—The sugar beet plant or plant part according to any of statements 49 to 50 wherein said mutation is homozygous or heterozygous.
[0084] 52—The sugar beet plant or plant part according to any of statements 49 to 51, comprising any one or more of SEQ ID NOs: 17 or 18, preferably wherein Y is T.

[0085] In an aspect, the invention relates to a method, such as a method for identifying a (desired) allelic variation in a population or a method for selecting an individual comprising a (desired) allelic variation, comprising providing one or more synthetic oligonucleotide comprising a (desired) allelic variation; providing an assay suitable for detecting said (desired) allelic variation; optimizing or validating said assay to ensure that the assay detects said (desired) allelic variation or discriminates between said (desired) allelic variation and a different allelic variation with said synthetic oligonucleotide(s) as a template; and screening a population for the presence of said (desired) allelic variation with said optimized or validated detection assay, and optionally selecting an individual comprising said (desired) allelic variation.

[0086] In an aspect, the invention relates to a method, such as a method for identifying a (desired) allelic variation in a population or for selecting an individual comprising a (desired) allelic variation, comprising screening a population for the presence of a (desired) allelic variation with an optimized or validated detection assay, and optionally selecting an individual comprising said (desired) allelic variation; said optimized or validated detection assay obtained by: providing one or more synthetic oligonucleotide comprising said desired allelic variation; providing an assay suitable for detecting said desired allelic variation; and optimizing or validating said assay in order to detects said (desired) allelic variation or discriminate between said desired allelic variation and a different allelic variation with said synthetic oligonucleotide(s) as a template.

[0087] In an aspect, the invention relates to a method for generating an individual comprising a (desired) allelic variation in a population, comprising: providing a population; mutagenizing said population; providing one or more synthetic oligonucleotide comprising said (desired) allelic variation; providing an assay suitable for detecting said (desired) allelic variation; optimizing or validating said assay to ensure that the assay detects said (desired) allelic variation or discriminates between said (desired) allelic variation and a different allelic variation with said synthetic oligonucleotide(s) as a template; screening said mutagenized population for the presence of said (desired) allelic variation with said optimized or validated detection assay; selecting an individual comprising said (desired) allelic variation; optionally propagating said individual. In certain embodiments, an individual comprising a (desired) allelic variation can be propagated so as to obtain a homozygous allelic variation. Homozygous allelic variation can be obtained by means well known in the art such as (back)crossing and selecting.

[0088] As used herein, the term “population” refers to a group of individuals (or parts thereof) of a particular biological species, subspecies, or variety. A population comprises at least two individuals, preferably at least 10 individuals, more preferably at least 100 individuals, such as at least 1000 individuals or at least 10000 individuals. It will be understood that when referring to a population or individual, also parts or derivatives thereof may be included. The terms “individual” and “individuum” are used herein interchangeably.

[0089] In certain embodiments, the part of an individual is an organ, a tissue, a cell or a seed of the individual.

[0090] In certain embodiments, the population or individual (or part thereof) is a plant (population). As used herein unless clearly indicated otherwise, the term “plant” intended to mean a plant at any developmental stage.

[0091] The term “plant” according to the present invention includes whole plants or parts of such a whole plant. Whole plants preferably are seed plants, or a crop. “Parts of a plant” are e.g. shoot vegetative organs/structures, e.g., leaves, stems and tubers; roots, flowers and floral organs/structures, e.g. bracts, sepals, petals, stamens, carpels, anthers and ovules; seed, including embryo, endosperm, and seed coat; fruit and the mature ovary; plant tissue, e.g. vascular tissue, ground tissue, and the like; and cells, e.g. guard cells, egg cells, pollen, trichomes and the like; and progeny of the same. Parts of plants may be attached to or separate from a whole intact plant. Such parts of a plant include, but are not limited to, organs, tissues, and cells of a plant, and preferably seeds. A “plant cell” is a structural and physiological unit of a plant, comprising a protoplast and a cell wall. The plant cell may be in form of an isolated single cell or a cultured cell, or as a part of higher organized unit such as, for example, plant tissue, a plant organ, or a whole plant. “Plant cell culture” means cultures of plant units such as, for example, protoplasts, cell culture cells, cells in plant tissues, pollen, pollen tubes, ovules, embryo sacs, zygotes and embryos at various stages of development. “Plant material” refers to leaves, stems, roots, flowers or flower parts, fruits, pollen, egg cells, zygotes, seeds, cuttings, cell or tissue cultures, or any other part or product of a plant. This also includes callus or callus tissue as well as extracts (such as extracts from taproots) or samples. A “plant organ” is a distinct and visibly structured and differentiated part of a plant such as a root, stem, leaf, flower bud, or embryo. “Plant tissue” as used herein means a group of plant cells organized into a structural and functional unit. Any tissue of a plant in planta or in culture is included. This term includes, but is not limited to, whole plants, plant organs, plant seeds, tissue culture and any groups of plant cells organized into structural and/or functional units. The use of this term in conjunction with, or in the absence of, any specific type of plant tissue as listed above or otherwise embraced by this definition is not intended to be exclusive of any other type of plant tissue. In certain embodiments, the part of the plant is selected from the group consisting of leaves, stems, roots, emerged radicles, flowers, flower parts, petals, fruits, pollen, pollen tubes, anther filaments, ovules, embryo sacs, egg cells, ovaries, zygotes, embryos, zygotic embryos, somatic embryos, apical meristems, vascular bundles, pericycles, seeds, roots, and cuttings.

[0092] In certain embodiments, the plant is not a plant variety.

[0093] In certain embodiments, the population or individual (or part thereof) is selected from or originates from, a plant species selected from the group consisting of: Hordeum vulgare, Hordeum bulbusom, Sorghum bicolor, Saccharum officinarium, Zea mays, Setaria italica, Oryza minuta, Oryza sativa, Oryza australiensis, Oryza alta, Triticum aestivum, Secale cereale, Malus domestica, Brachypodium distach-yon, Hordeum marinum, Aegilops tauschii, Daucus glochidiatus, Beta vulgaris, Daucus pusillus, Daucus muricatus, Daucus carota, Eucalyptus grandis, Nicotiana sylvestris, Nicotiana tomentosiformis, Nicotiana tabacum, Solanum lycopersicum, Solanum tuberosum, Coffea canephora, Vitis vinifera, Erythrante guttata, Genlisea aurea, Cucumis sativus, Morus notabilis, Arabidopsis arenosa, Arabidopsis lyrata, Arabidopsis thaliana, Crucihimalaya himalaica, Crucihimalaya wallichii, Cardamine flexuosa, Lepidium virginicum, Capsella bursa pastoris, Olmarabidopsis pumila, Arabis hirsute, Brassica napus, Brassica oleracea, Brassica rapa, Raphanus sativus, Brassica juncea, Brassica nigra, Eruca vesicaria subsp. sativa, Citrus sinensis, Jatropha curcas, Populus trichocarpa, Medicago truncatula, Cicer yama-shitae, Cicer bijugum, Cicer arietinum, Cicer reticulatum, Cicer judaicum, Cajanus cajanifolius, Cajanus scarabaeoides, Phaseolus vulgaris, Glycine max, Astragalus sinicus, Lotus japonicas, Torenia fournieri, Allium cepa, Allium fistulosum, Allium sativum, and Allium tuberosum.

[0094] As used herein, “maize” refers to a plant of the species Zea mays, preferably Zea mays ssp mays.

[0095] As used herein, “sugar beet” refers to a plant of the species Beta vulgaris, preferably Beta vulgaris ssp vulgaris. For example, numbering among these are Beta vulgaris subsp. vulgaris var. altissima (sugar beet in a narrower sense), Beta vulgaris ssp. vulgaris var. vulgaris (chard), Beta vulgaris ssp. vulgaris var. conditiva (beetroot/red beet), Beta vulgaris ssp. vulgaris var. crassa/alba (fodder beet).

[0096] The term “oligonucleotide” when used herein relates to a (short) DNA or RNA molecule. Oligonucleotides are characterized by the sequence of nucleotide residues that make up the entire molecule. The oligonucleotide may comprise or encompass a marker as defined herein elsewhere. In certain embodiments, the oligonucleotide is an artificial or synthetic oligonucleotide. In certain embodiments, the sequence of the oligonucleotide is not naturally occurring. The oligonucleotide in certain embodiments comprises at least one nucleotide which is not identical to a corresponding nucleotide in an otherwise identical oligonucleotide the sequence of which is naturally occurring. In certain embodiments, the sequence of the oligonucleotide is naturally occurring. In certain embodiments, the oligonucleotide comprises or encodes the desired allelic variation. Depending on the type of assay to detect the allelic variation, the allelic variation may occur at different positions within the oligonucleotide. Typically however, the oligonucleotide may comprise the allelic variation and 5′ and 3′ flanking sequences. In certain embodiments, the invention provides multiple oligonucleotides. In such embodiments, such multiple oligonucleotides each may comprise a different allelic variation, such as naturally and/or non-naturally occurring allelic variations. The length of the oligonucleotide is not of particular importance. The oligonucleotide according to the present invention however, preferably has a length sufficient that a particular allelic variation can be detected. For instance, the length of the oligonucleotide should preferably be sufficient that assay primers are able to bind/anneal. PCR-based assays need always a forward primer and a reverse primer, such that the sum of these primers is the absolute minimum length of the oligonucleotides in such PCR-based assay. There is no maximum length and is in principle infinite, but typically is limited by the capability (and cost) of oligonucleotide synthesis. The length of the oligonucleotide may for instance also be determined by the amount of allelic variations which need to be (simultaneously) analysed. In particular cases it might be reasonable to synthetize a longer oligonucleotide if this oligonucleotide carries several different mutations on which the marker shall be tested in one go. In certain embodiments, the oligonucleotide ranges from 50 to 500 nucleotides in length, such as from 50 to 450, 50 to 400, 50 to 350, 50 to 300, 50 to 250, 50 to 200, 60 to 500, 60 to 450, 60 to 400, 60 to 350, 60 to 300, 60 to 250, 60 to 200, 70 to 500, 70 to 450, 70 to 400, 70 to 350, 70 to 300, 70 to 250, 70 to 200, 80 to 500, 80 to 450, 80 to 400, 80 to 350, 80 to 300, 80 to 250, or 80 to 200. In certain preferred embodiments, the oligonucleotide has a length ranging from 80 to 200 nucleotides. The oligonucleotide as used herein may or may not encode (part) of a polypeptide or protein. Accordingly, the oligonucleotide may or may not comprise (part) of the coding sequence of a polypeptide or protein. In certain embodiments, the oligonucleotide may correspond to (part of) a non-coding part of a gene. In certain embodiments, the oligonucleotide may correspond to (part of) a regulatory sequence of a gene.

[0097] In certain embodiments, the invention provides more than one (synthetic) oligonucleotide, such as two or more (synthetic) oligonucleotides or three or more allelic variations. In certain embodiments, such more than one (synthetic) oligonucleotides each comprise different allelic variations, such as a desired allelic variation and another or other allelic variation(s). In certain embodiments, one (synthetic) oligonucleotide comprises more than one (desired or other) allelic variation. Accordingly, in such embodiments, one (synthetic) oligonucleotide can be used to optimize or validate an assay for detecting multiple (desired or other) allelic variations simultaneously (i.e. with one oligonucleotide). The skilled person will understand that in such case, preferably the multiple allelic variations are in close proximity, such as for instance separated by maximum 500 nucleotides, preferably maximum 400 nucleotides, more preferably maximum 300 nucleotides, even more preferably maximum 200 nucleotides or maximum 150 or 100 nucleotides.

[0098] The oligonucleotide according to the invention may be a DNA oligonucleotide or an RNA oligonucleotide, preferably a DNA oligonucleotide. The oligonucleotide according to the invention may be a single-stranded oligonucleotide or a double-stranded oligonucleotide, preferably a double-stranded oligonucleotide. It will be understood that a double-stranded oligonucleotide may nevertheless comprise single-stranded regions, such as for instance at the 5′ and/or 3′ termini. Typically however, the desired allelic variation resided in a double-stranded portion of the oligonucleotide.

[0099] In certain embodiments, the (synthetic) oligonucleotide is spiked in polynucleic acids. Accordingly, the oligonucleotide may be mixed with or present in a mixture with polynucleic acids (different than the oligonucleotide). In certain embodiments, provided is a mixture or composition comprising a (synthetic) oligonucleotide as described herein according to the invention and (different) polynucleic acids. Such composition or mixture can be used in the methods of the invention as described herein. It will be understood that the polynucleic acids referred to may have a different sequence and/or length. In certain embodiments, the polynucleic acids comprise DNA. In certain embodiments, the polynucleic acids comprise genomic DNA, such as fragmented or unfragmented genomic DNA. In certain embodiments, the polynucleic acids are derived from or originate from the same species, subspecies, or variety as the population or individual as described herein elsewhere. In certain embodiments, the polynucleic acids (e.g. genomic DNA) are endogenous, wild type or native polynucleic acids, such as endogenous, wild type or native polynucleic acids derived from or originating from the same species, subspecies, or variety as the population or individual.

[0100] In certain embodiments, the invention relates to the identification of an allelic variant or allelic variation. Such variant may be a particular or desired allelic variant, i.e. an allelic variant sought after. The desired allelic variation may be an allelic variation of an endogenous gene (coding or non-coding) or a genetic element, such as a regulatory genetic element, including but not limited to promoters, enhancers, terminators, insulators, etc. This desired allelic variation preferably is associated with or confers a specific trait, preferably an agronomically important phenotype. A desired allelic variation may preferably be characterised by a particular nucleotide and/or protein sequence, such as a particular nucleotide and/or protein sequence of a marker.

[0101] As used herein, an “allele” refers to alternative forms of various genetic units associated with different forms of a gene or of any kind of identifiable genetic element, which are alternative in inheritance because they are situated at the same locus in homologous chromosomes. In a diploid cell or organism, the two alleles of a given gene (or marker) typically occupy corresponding loci on a pair of homologous chromosomes. Allelic variants or allelic variations correspond to genes or genetic elements having one or more nucleotide difference(s). Preferably according to the invention, the allelic variants, in particular the desired allelic variant, results in expression of a protein having a different sequence and/or results in a different expression level of a protein. In certain embodiments, the allelic variation is situated in the coding sequence of a gene and results in a variation of one or more amino acid(s).

[0102] A variation of one amino acid may be the consequence of for instance a point mutation. Alternatively, the variation may result in the generation of a stop codon, and hence result in a truncated protein. In certain embodiments, the allelic variation is situated in the non-coding sequence of a gene, such as UTR or intron sequence and may affect for instance translation, stability and/or splicing. In certain embodiments, the allelic variation is situated in a regulatory sequence of a gene, such as promoters, enhancers, terminators, insulators, etc and may result in altered expression of a protein or RNA, such as increased or decreased expression. In certain embodiments, the allelic variation is a single nucleotide polymorphism (SNP). An SNP is to be understood as a variation in a single nucleotide that occurs at a specific position in the genome, where each variation is present to some appreciable degree within a population. In certain embodiments, the allelic variation is an indel. An indel is to be understood as being an insertion or deletion of bases in the genome of an organism. In certain embodiments, the indel results in a frameshift, preferably a frameshift in the coding region of a gene. In certain embodiments, the indel may create, abrogate, or otherwise affect the function of a gene or genetic element. The allelic variation as used herein may be naturally occurring or non-naturally occurring. A naturally occurring allelic variation is to be understood to be present at a certain frequency in a given population. In contrast, a non-naturally occurring allelic variation is not present in a given population. In a preferred embodiment, the allelic variation is non-naturally occurring or preferably occurring in less than 1%, such as preferably less than 0.1% of a given population. It will be understood that all these types of mutations described above are encompassed by the term allelic variation as used herein.

[0103] The endogenous gene described above in certain embodiments is selected from the group consisting of a gene encoding resistance or tolerance to abiotic stress, including drought stress, osmotic stress, heat stress, cold stress, oxidative stress, heavy metal stress, nitrogen deficiency, phosphate deficiency, salt stress or waterlogging, herbicide resistance, including resistance to glyphosate, glufosinate/phosphinotricin, hygromycin, protoporphyrinogen oxidase (PPO) inhibitors, ALS inhibitors, and Dicamba, a gene encoding resistance or tolerance to biotic stress, including a viral resistance gene, a fungal resistance gene, a bacterial resistance gene, an insect resistance gene, or a gene encoding a yield related trait, including lodging resistance, flowering time, shattering resistance, seed colour, endosperm composition, or nutritional content.

[0104] The genetic element described above in certain embodiments is a DNA encoding a non-coding RNA like rRNA, tRNA, miRNA, siRNA, piRNA, snRNA, snoRNA, IncRNA, antisense-RNA, riboswitches or ribozyme, or a regulatory sequence or at least part of a regulatory sequence, wherein the regulatory sequence or the part thereof comprises at least one of a core promoter sequence, a proximal promoter sequence, a cis regulatory sequence, a trans regulatory sequence, a locus control sequence, an insulator sequence, a silencer sequence, an enhancer sequence, a terminator sequence, and/or any combination thereof.

[0105] An agronomically important phenotype in the context of the present invention is a phenotype of a plant, which exhibits one or more novel or optimized trait(s) that provide an improved agricultural performance with respect to e.g. yield, biomass, architecture, morphology, fertility, pollen shedding, nutrient partitioning, photosynthesis, carbon sequestration, disease resistance, abiotic and biotic stress tolerance, herbicide tolerance, hormone signalling, and other trait categories. An agronomically important phenotype may be caused by any one allelic variation or a combination of one or more allelic variations in one or more coding, non-coding or regulatory regions of the genetic material of the plant. The modifications may be associated in terms of spatial proximity or genomic context or they may be completely unrelated. An agronomically important phenotype may thus exhibit one or more polygenic traits. The term “sequence” when used herein relates to nucleotide sequence(s), polynucleotide(s), nucleic acid sequence(s), nucleic acid(s), nucleic acid molecule, peptides, polypeptides and proteins, depending on the context in which the term “sequence” is used. The terms “nucleotide sequence(s)”, “polynucleotide(s)”, “nucleic acid sequence(s)”, “nucleic acid(s)”, “nucleic acid molecule” are used interchangeably herein and refer to nucleotides, either ribonucleotides or deoxyribonucleotides or a combination of both, in a polymeric unbranched form of any length. Nucleic acid sequences include DNA, cDNA, genomic DNA, RNA, synthetic forms and mixed polymers, both sense and antisense strands, or may contain non-natural or derivatized nucleotide bases, as will be readily appreciated by those skilled in the art.

[0106] An “isolated nucleic acid” is understood to be a nucleic acid isolated from its natural or original environment. The term also includes a synthetic manufactured nucleic acid. As used herein, the oligonucleotides according to the invention are preferably isolated nucleic acid sequences.

[0107] When used herein, the term “polypeptide” or “protein” (both terms are used interchangeably herein) means a peptide, a protein, or a polypeptide which encompasses amino acid chains of a given length, wherein the amino acid residues are linked by covalent peptide bonds. However, peptidomimetics of such proteins/polypeptides wherein amino acid(s) and/or peptide bond(s) have been replaced by functional analogs are also encompassed by the invention as well as other than the 20 gene-encoded amino acids, such as selenocysteine. Peptides, oligopeptides and proteins may be termed polypeptides. The term polypeptide also refers to, and does not exclude, modifications of the polypeptide, e.g., glycosylation, acetylation, phosphorylation and the like. Such modifications are well described in basic texts and in more detailed monographs, as well as in the research literature.

[0108] Amino acid substitutions encompass amino acid alterations in which an amino acid is replaced with a different naturally-occurring amino acid residue. Such substitutions may be classified as “conservative”, in which an amino acid residue contained in the wild-type protein is replaced with another naturally-occurring amino acid of similar character, for example Gly↔Ala, Val↔Ile↔Leu, Asp↔Glu, Lys↔Arg, Asn↔Gln or Phe↔Trp↔Tyr. Substitutions encompassed by the present invention may also be “non-conservative”, in which an amino acid residue which is present in the wild-type protein is substituted with an amino acid with different properties, such as a naturally-occurring amino acid from a different group (e.g. substituting a charged or hydrophobic amino acid with alanine. “Similar amino acids”, as used herein, refers to amino acids that have similar amino acid side chains, i.e. amino acids that have polar, non-polar or practically neutral side chains. “Non-similar amino acids”, as used herein, refers to amino acids that have different amino acid side chains, for example an amino acid with a polar side chain is non-similar to an amino acid with a non-polar side chain. Polar side chains usually tend to be present on the surface of a protein where they can interact with the aqueous environment found in cells (“hydrophilic” amino acids). On the other hand, “non-polar” amino acids tend to reside within the center of the protein where they can interact with similar non-polar neighbours (“hydrophobic” amino acids”). Examples of amino acids that have polar side chains are arginine, asparagine, aspartate, cysteine, glutamine, glutamate, histidine, lysine, serine, and threonine (all hydrophilic, except for cysteine which is hydrophobic). Examples of amino acids that have non-polar side chains are alanine, glycine, isoleucine, leucine, methionine, phenylalanine, proline, and tryptophan (all hydrophobic, except for glycine which is neutral).

[0109] The term “gene” when used herein refers to a polymeric form of nucleotides of any length, either ribonucleotides or deoxyribonucleotides. The term includes double- and single-stranded DNA and RNA. It also includes known types of modifications, for example, methylation, “caps”, substitutions of one or more of the naturally occurring nucleotides with an analog. Preferably, a gene comprises a coding sequence encoding the herein defined polypeptide. A “coding sequence” is a nucleotide sequence which is transcribed into mRNA and/or translated into a polypeptide when placed or being under the control of appropriate regulatory sequences. The boundaries of the coding sequence are determined by a translation start codon at the 5′-terminus and a translation stop codon at the 3′-terminus. A coding sequence can include, but is not limited to mRNA, cDNA, recombinant nucleic acid sequences or genomic DNA, while introns may be present as well under certain circumstances.

[0110] A used herein, the term “endogenous” refers to a gene or allele which is present in its natural genomic location. The term “endogenous” can be used interchangeably with “native”. This does not however exclude the presence of one or more nucleic acid differences with the (reference) wild-type allele. In particular embodiments, the difference with a wild-type allele can be limited to less than 9 preferably less than 6, more particularly less than 3 nucleotide differences. More particularly, the difference with the wildtype sequence can be in only one nucleotide. Preferably, the endogenous allele encodes a modified protein having less than 9, preferably less than 6, more particularly less than 3 and even more preferably only one amino acid difference with the (reference) wild-type protein. Naturally occurring polymorphisms may be considered endogenous, native, and/or wild type. Non-naturally occurring polymorphisms or mutations may be considered exogenous, non-native, or genetically engineered.

[0111] As used herein, the term “homozygote” refers to an individual cell or plant having the same alleles (or allelic variation(s)) at one or more or all loci. When the term is used with reference to a specific locus or gene, it means at least that locus or gene has the same alleles (or allelic variation(s)). As used herein, the term “homozygous” means a genetic condition existing when identical alleles (or allelic variation(s)) reside at corresponding loci on homologous chromosomes. As used herein, the term “heterozygote” refers to an individual cell or plant having different alleles (or allelic variation(s)) at one or more or all loci. When the term is used with reference to a specific locus or gene, it means at least that locus or gene has different alleles (or allelic variation(s)). As used herein, the term “heterozygous” means a genetic condition existing when different alleles (or allelic variation(s)) reside at corresponding loci on homologous chromosomes.

[0112] A “polymorphism” is a variation in the DNA between two or more individuals within a population. A polymorphism preferably has a frequency of at least 1% in a population. A useful polymorphism can include a single nucleotide polymorphism (SNP), a simple sequence repeat (SSR), or an insertion/deletion polymorphism, also referred to herein as an “indel”. The term “indel” refers to an insertion or deletion, wherein one line may be referred to as having an inserted nucleotide or piece of DNA relative to a second line, or the second line may be referred to as having a deleted nucleotide or piece of DNA relative to the first line.

[0113] A “marker” is a (means of finding a position on a) genetic or physical map, or else linkages among markers and trait loci (loci affecting traits). The position that the marker detects may be known via detection of polymorphic alleles and their genetic mapping, or else by hybridization, sequence match or amplification of a sequence that has been physically mapped. A marker can be a DNA marker (detects DNA polymorphisms), a protein (detects variation at an encoded polypeptide), or a simply inherited phenotype (such as the ‘waxy’ phenotype). A DNA marker can be developed from genomic nucleotide sequence or from expressed nucleotide sequences (e.g., from a spliced RNA or a cDNA). Depending on the DNA marker technology, the marker may consist of complementary primers flanking the locus and/or complementary probes that hybridize to polymorphic alleles at the locus. The term marker locus is the locus (gene, sequence or nucleotide) that the marker detects. “Marker” or “molecular marker” or “marker locus” may also be used to denote a nucleic acid or amino acid sequence that is sufficiently unique to characterize a specific locus on the genome. Any detectable polymorphic trait can be used as a marker so long as it is inherited differentially and exhibits linkage disequilibrium with a phenotypic trait of interest. As used herein, a marker may comprise allelic variations as defined herein elsewhere.

[0114] Markers that detect genetic polymorphisms between members of a population are well-established in the art. Markers can be defined by the type of polymorphism that they detect and also the marker technology used to detect the polymorphism. Marker types include but are not limited to, e.g., detection of restriction fragment length polymorphisms (RFLP), detection of isozyme markers, randomly amplified polymorphic DNA (RAPD), amplified fragment length polymorphisms (AFLPs), detection of simple sequence repeats (SSRs), detection of amplified variable sequences of the plant genome, detection of self-sustained sequence replication, or detection of single nucleotide polymorphisms (SNPs). SNPs can be detected e.g. via DNA sequencing, PCR-based sequence specific amplification methods, detection of polynucleotide polymorphisms by allele specific hybridization (ASH), dynamic allele-specific hybridization (DASH), molecular beacons, microarray hybridization, oligonucleotide ligase assays, Flap endonucleases, 5′ endonucleases, primer extension, single strand conformation polymorphism (SSCP) or temperature gradient gel electrophoresis (TGGE). DNA sequencing, such as the pyrosequencing technology has the advantage of being able to detect a series of linked SNP alleles that constitute a haplotype. Haplotypes tend to be more informative (detect a higher level of polymorphism) than SNPs.

[0115] A “marker allele”, alternatively an “allele of a marker locus” or “an allelic variation”, can refer to one of a plurality of polymorphic nucleotide sequences found at a marker locus in a population. With regard to a SNP marker, allele refers to the specific nucleotide base present at that SNP locus in that individual plant.

[0116] Means for detecting allelic variations are well known in the art. According to the invention, any type of means or assay for detecting allelic variations or nucleotide sequences in general are suitable for practicing the invention. Preferably however, such means do not include DNA or RNA sequencing. Means or assays for detection include for instance without limitation hybridization based methods (such as (dynamic) allele-specific hybridization, molecular beacons, SNP microarrays), enzyme based methods (such as PCR, KASP (Kompetitive Allele Specific PCR), RFLP, ALFP, RAPD, Flap endonuclease, primer extension, 5′-nuclease, oligonucleotide ligation assay), post-amplification methods based on physical properties of DNA (such as single strand conformation polymorphism, temperature gradient gel electrophoresis, denaturing high performance liquid chromatography, high-resolution melting of the entire amplicon, use of DNA mismatch-binding proteins, SNPlex, surveyor nuclease assay), etc. in certain preferred embodiments, a suitable detection assay for practicing the invention is allele-specific PCR, such as including but not limited to KASP (commercialized for instance by LGC; see also He et al. (2014), Methods Mol Biol, 1145:75-86 doi: 10.1007/978-1-4939-0446-4_7; incorporated by reference in its entirety). Allele-specific PCR is well known in the art. By means of further guidance, and without limitation, allele-specific PCR may be performed with three primers: one common reverse primer and two (or more, depending on the number of polymorphisms to be tested) forward primers of which at least one of the primers is chosen from a polymorphic area, with the mutations located at (or near) its 3′-end. Under stringent conditions, a mismatched primer will not initiate replication, whereas a matched primer will. The appearance of an amplification product therefore indicates the genotype. Differential labelling of the forward primers can also distinguish between polymorphisms (or genotypes). By means of further guidance, and without limitation, reference is made to Gaudet et al. (2009), Methods Mol Biol, 578:415-424, doi: 10.1007/978-1-60327-411-1_26, incorporated herein by reference in its entirety. In certain other preferred embodiments, a suitable assay for practicing the invention is allele-specific hybridization, such as with allele-specific oligonucleotides (ASO). Hybridization-based assays may include microarrays.

[0117] In an aspect, the invention relates to a detection assay (suitable) for use in the methods of the invention as described herein, such as the methods for identifying a (desired) allelic variation, for selecting an individual comprising a (desired) allelic variation, or for generating an individual comprising a (desired) allelic variation. In certain embodiments, the assay is an allele-specific PCR, such as KASP. In certain embodiments, the assay is an allele-specific hybridization assay. In certain embodiments, the assay is a microarray. Suitable oligonucleotides to be included in the assay are as described herein elsewhere. Suitable primers or probes to be included in the assay are as described herein elsewhere.

[0118] As used herein, the term “sequence identity” refers to the degree of identity between any given nucleic acid sequence and a target nucleic acid sequence. Percent sequence identity is calculated by determining the number of matched positions in aligned nucleic acid sequences, dividing the number of matched positions by the total number of aligned nucleotides, and multiplying by 100. A matched position refers to a position in which identical nucleotides occur at the same position in aligned nucleic acid sequences. Percent sequence identity also can be determined for any amino acid sequence. To determine percent sequence identity, a target nucleic acid or amino acid sequence is compared to the identified nucleic acid or amino acid sequence using the BLAST 2 Sequences (Bl2seq) program from the stand-alone version of BLASTZ containing BLASTN and BLASTP. This stand-alone version of BLASTZ can be obtained from Fish & Richardson's web site (World Wide Web at fr.com/blast) or the U.S. government's National Center for Biotechnology Information web site (World Wide Web at ncbi.nlm.nih.gov). Instructions explaining how to use the Bl2seq program can be found in the readme file accompanying BLASTZ. Bl2seq performs a comparison between two sequences using either the BLASTN or BLASTP algorithm.

[0119] BLASTN is used to compare nucleic acid sequences, while BLASTP is used to compare amino acid sequences. To compare two nucleic acid sequences, the options are set as follows: -i is set to a file containing the first nucleic acid sequence to be compared (e.g., C:\seq I .txt); -j is set to a file containing the second nucleic acid sequence to be compared (e.g., C:\seq2.txt); -p is set to blastn; -o is set to any desired file name (e.g., C:\output.txt); -q is set to -1; -r is set to 2; and all other options are left at their default setting. The following command will generate an output file containing a comparison between two sequences: C:\B12seq -i c:\seqI .txt -j c:\seq2.txt -p blastn -o c:\output.txt -q -1 -r 2. If the target sequence shares homology with any portion of the identified sequence, then the designated output file will present those regions of homology as aligned sequences. If the target sequence does not share homology with any portion of the identified sequence, then the designated output file will not present aligned sequences. Once aligned, a length is determined by counting the number of consecutive nucleotides from the target sequence presented in alignment with the sequence from the identified sequence starting with any matched position and ending with any other matched position. A matched position is any position where an identical nucleotide is presented in both the target and identified sequences. Gaps presented in the target sequence are not counted since gaps are not nucleotides. Likewise, gaps presented in the identified sequence are not counted since target sequence nucleotides are counted, not nucleotides from the identified sequence. The percent identity over a particular length is determined by counting the number of matched positions over that length and dividing that number by the length followed by multiplying the resulting value by 100. For example, if (i) a 500-base nucleic acid target sequence is compared to a subject nucleic acid sequence, (ii) the Bl2seq program presents 200 bases from the target sequence aligned with a region of the subject sequence where the first and last bases of that 200-base region are matches, and (iii) the number of matches over those 200 aligned bases is 180, then the 500-base nucleic acid target sequence contains a length of 200 and a sequence identity over that length of 90% (i.e. , 180/200×100=90). It will be appreciated that different regions within a single nucleic acid target sequence that aligns with an identified sequence can each have their own percent identity. It is noted that the percent identity value is rounded to the nearest tenth. For example, 78.11, 78.12, 78.13, and 78.14 are rounded down to 78.1, while 78.15, 78.16, 78.17, 78.18, and 78.19 are rounded up to 78.2. It also is noted that the length value will always be an integer.

[0120] When reference is made to a nucleic acid sequence (e.g. DNA or genomic DNA) having “substantial sequence identity to” a reference sequence or having a sequence identity of at least 80%, e.g. at least 85%, 90%, 95%, 98% or 99% nucleic acid sequence identity to a reference sequence, in one embodiment said nucleotide sequence is considered substantially identical to the given nucleotide sequence and can be identified using stringent hybridisation conditions. In another embodiment, the nucleic acid sequence comprises one or more mutations compared to the given nucleotide sequence but still can be identified using stringent hybridisation conditions.

[0121] “Stringent hybridisation conditions” can be used to identify nucleotide sequences, which are substantially identical to a given nucleotide sequence. Stringent conditions are sequence dependent and will be different in different circumstances. Generally, stringent conditions are selected to be about 5° C. lower than the thermal melting point (Tm) for the specific sequences at a defined ionic strength and pH. The Tm is the temperature (under defined ionic strength and pH) at which 50% of the target sequence hybridises to a perfectly matched probe. Typically stringent conditions will be chosen in which the salt concentration is about 0.02 molar at pH 7 and the temperature is at least 60° C. Lowering the salt concentration and/or increasing the temperature increases stringency. Stringent conditions for RNA-DNA hybridisations (Northern blots using a probe of e.g. 100 nt) are for example those which include at least one wash in 0.2×SSC at 63° C. for 20 min, or equivalent conditions. Stringent conditions for DNA-DNA hybridisation (Southern blots using a probe of e.g. 100 nt) are for example those which include at least one wash (usually 2) in 0.2×SSC at a temperature of at least 50° C., usually about 55° C., for 20 min, or equivalent conditions. See also Sambrook et al. (1989) and Sambrook and Russell (2001).

[0122] The term “hybridizing” or “hybridization” means a process in which a single-stranded nucleic acid molecule attaches itself to a complementary nucleic acid strand, i.e. agrees with this base pairing. Standard procedures for hybridization are described, for example, in Sambrook et al. (Molecular Cloning. A Laboratory Manual, Cold Spring Harbor Laboratory Press, 3rd edition 2001). Preferably this will be understood to mean an at least 50%, more preferably at least 55%, 60%, 65%, 70%, 75%, 80% or 85%, more preferably 90%, 91%, 92%, 93%, 94%, 95%, 96%, 97%, 98% or 99% of the bases of the nucleic acid strand form base pairs with the complementary nucleic acid strand. The possibility of such binding depends on the stringency of the hybridization conditions. The term “stringency” refers to hybridization conditions. High stringency is if base pairing is more difficult, low stringency, when a base-pairing is facilitated. The stringency of hybridization conditions depends for example on the salt concentration or ionic strength and temperature. Generally, the stringency can be increased by increasing the temperature and/or decreasing salinity. “Stringent hybridization conditions” are defined as conditions in which hybridization occurs predominantly only between homologous nucleic acid molecules. The term “hybridization conditions” refers not only to the actual binding of the nucleic acids at the prevailing conditions, but also in the subsequent washing steps prevailing conditions. Stringent hybridization conditions are, for example, conditions under which predominantly only those nucleic acid molecules having at least 70%, preferably at least 75%, at least 80%, at least 85%, at least 90% or at least 95% sequence identity hybridize. Less stringent hybridization conditions include: hybridization in 4×SSC at 37° C., followed by repeated washing in 1×SSC at room temperature. Stringent hybridization conditions include: hybridization in 4×SSC at 65° C., followed by repeated washing in 0.1×SSC at 65° C. for a total of about 1 hour.

[0123] In an aspect, the methods of the invention as described herein comprise optimization and/or validation of a means or assay for detecting allelic variations, such as a desired allelic variation as described herein elsewhere. Such optimization or validation may be performed with the (synthetic) oligonucleotide, as described herein elsewhere, as a template. As used herein, optimization may include increasing the specificity and/or sensitivity of the assay. The terms specificity and sensitivity have their ordinary meaning in the art. By means of further guidance, and without limitation, specificity refers to the true negative rate and measures the proportion of actual negatives that are correctly identified as such. By means of further guidance, and without limitation, sensitivity refers to the true positive rate, the recall, or probability of detection and measures the proportion of actual positives that are correctly identified as such. Similarly, validation may include measurement of specificity and/or sensitivity and optionally comparing such sensitivity/specificity with a predetermined threshold. If the threshold is reached, the assay is validated. Validation and/or optimization may include verification that the assay discriminates or can discriminate between different alleles, such as between a desired allelic variation and another allelic variation. Accordingly, in certain embodiments, validation and/or optimization of the assay comprises performing the assay with a (synthetic) oligonucleotide comprising a particular (desired) allelic variation as a template and comparing the with an assay performed with a (synthetic) oligonucleotide comprising another allelic variation as a template. In certain embodiments, optimization and/or validation of the assay comprises performing the assay with a (synthetic) oligonucleotide comprising a particular (desired) allelic variation as a template and a (synthetic) oligonucleotide comprising another allelic variation as a template. Detection of and/or discrimination between the (desired) allelic variation and another allelic variation validates the assay or indicates an optimized assay. In certain embodiments, in particular in PCR-based or hybridization-based assays, validation and/or optimization comprise comparing different primers (forward and/or reverse) or probes and selecting those primers or probes which discriminate between a particular (desired) allelic variation and another allelic variation, preferably those primers or probes which discriminate best between a particular (desired) allelic variation and another allelic variation. In certain embodiments, in particular in PCR-based or hybridization-based assays, validation and/or optimization comprise selecting primers (forward and/or reverse) or probes and which discriminate between a particular (desired) allelic variation and another allelic variation, preferably those primers or probes which discriminate best between a particular (desired) allelic variation and another allelic variation. In certain embodiments, in particular in PCR-based or hybridization-based assays, validation and/or optimization comprise selecting primers (forward and/or reverse) or probes and which are capable of detecting a particular (desired or other) allelic variation. In all these embodiments, preferably the primers or probes are selected or designed which have increased or optimal selectivity and/or specificity. The skilled person will understand that an “optimal” sensitivity and/or specificity to a certain extent may be tentative. Nevertheless, the skilled person will be capable of selecting or designing primers or probes which are capable of detecting a particular (desired) allelic variation or (optimally) discriminating between a particular (desired) allelic variation and another allelic variation. The skilled person will understand that heuristics may be involved in validating and/or optimizing the assay.

[0124] In certain embodiments, the individuals or population(s) as described herein are mutagenized.

[0125] In certain embodiments, mutagenesis is random mutagenesis. Cells or organisms may be exposed to mutagens such as UV radiation, X rays or mutagenic chemicals (such as for instance such as ethyl methanesulfonate (EMS)), and mutants with desired characteristics are then selected. Mutants can for instance be identified by TILLING (Targeting Induced Local Lesions in Genomes). The method combines mutagenesis, such as mutagenesis using a chemical mutagen such as ethyl methanesulfonate (EMS) with a sensitive DNA screening-technique that identifies single base mutations/point mutations in a target gene. The TILLING method relies on the formation of DNA heteroduplexes that are formed when multiple alleles are amplified by PCR and are then heated and slowly cooled. A “bubble” forms at the mismatch of the two DNA strands, which is then cleaved by a single stranded nuclease. The products are then separated by size, such as by HPLC. See also McCallum et al.; Nat Biotechnol. 2000 April; 18(4):455-7 and McCallum et al.; Plant Physiol. 2000 June; 123(2):439-42; both incorporated herein by reference in their entirety.

[0126] In certain embodiments, mutagenesis is site-directed mutagenesis, such as site-directed gene editing. “Gene editing” or “genome editing” refers to genetic engineering in which in which DNA or RNA is inserted, deleted, modified or replaced in the genome of a living organism. Gene editing may comprise targeted or non-targeted (random) mutagenesis. Targeted mutagenesis may be accomplished for instance with designer nucleases, such as for instance with meganucleases, zinc finger nucleases (ZFNs), transcription activator-like effector-based nucleases (TALEN), the clustered regularly interspaced short palindromic repeats system like CRISPR/Cas9, CRISPR/Cpf1, CRISPR/Csm1, CRISPR/MAD7, and programmable base editors for transitions from C•G to T•A base pairs and transitions from A•T to G•C base pairs like CRISPR base editors. These nucleases create site-specific double-strand breaks (DSBs) at desired locations in the genome. The induced double-strand breaks are repaired through nonhomologous end-joining (NHEJ) or homologous recombination (HR), resulting in targeted mutations or nucleic acid modifications. The use of designer nucleases is particularly suitable for generating gene knockouts or knockdowns. Delivery and expression systems of designer nuclease systems as well as programmable base editors are well known in the art.

[0127] In certain embodiments, the population or individual as described herein comprises one or more mutation(s) or polymorphism(s). In certain embodiments, each member or individual of the population comprises one or more mutation(s) or polymorphism(s). It is to be understood that such mutation(s) or polymorphism(s) may be considered (an) allelic variation(s) as described herein elsewhere. In certain embodiments, said mutation or polymorphism is a point mutation. In certain embodiments, said mutation or polymorphism is an indel. In certain embodiments, said mutation or polymorphism results in a frameshift of a protein coding sequence. In certain embodiments, said mutation or polymorphism is a nonsense mutation. In certain embodiments, said mutation or polymorphism results in a knockout or knockdown of a gene and/or protein.

[0128] In certain embodiments, said mutation or polymorphism is a single nucleotide polymorphism (SNP). It will be understood that an individual or population may comprise one or more of the same or different types of mutation as described above.

[0129] In an aspect, the invention relates to a (synthetic) oligonucleotide comprising or consisting of the sequence of SEQ ID NO: 19 or 20 or the reverse complement, or a fragment thereof comprising the sequence of SEQ ID NO: 51 and/or SEQ ID NO: 52.

[0130] In an aspect, the invention relates to a (synthetic) oligonucleotide comprising or consisting of the sequence of SEQ ID NO: 17 or 18 or the reverse complement, or a fragment thereof of at least 10 nucleotides and comprising Y.

[0131] In an aspect, the invention relates to a (synthetic) oligonucleotide comprising or consisting of the sequence of SEQ ID NO: 45 or 46, or a fragment thereof comprising the reverse complement of the sequence of SEQ ID NO: 51 and/or SEQ ID NO: 52.

[0132] In an aspect, the invention relates to a (synthetic) oligonucleotide comprising or consisting of the sequence of SEQ ID NO: 44 or the reverse complement, or a fragment thereof comprising at least 12, preferably at least 15, more preferably at least 18 contiguous nucleotides. Preferably said oligonucleotide is a primer.

[0133] In an aspect, the invention relates to a (synthetic) oligonucleotide comprising or consisting of a fragment of the sequence of SEQ ID NO: 17 or 18, or the reverse complement, comprising at least 12, preferably at least 15, more preferably at least 18 contiguous nucleotides and comprising Y, preferably as the most 3′ or second most 3′ nucleotide. Preferably said oligonucleotide is a primer.

[0134] In an aspect, the invention relates to a (synthetic) oligonucleotide comprising or consisting of the sequence of SEQ ID NO: 42 or 43 or the reverse complement, or a fragment thereof comprising the sequence of SEQ ID NO: 53 or SEQ ID NO: 54.

[0135] In an aspect, the invention relates to a (synthetic) oligonucleotide comprising or consisting of the sequence of SEQ ID NO: 49 or 50, or a fragment thereof comprising the reverse complement of the sequence of SEQ ID NO: 53 or SEQ ID NO: 54.

[0136] In an aspect, the invention relates to a (synthetic) oligonucleotide comprising or consisting of the sequence of SEQ ID NO: 23, 25, 27, 29, 31, 33, 35, 37, 39, or 41 or the reverse complement, or a fragment thereof of at least 10 nucleotides and comprising Y.

[0137] In an aspect, the invention relates to a (synthetic) oligonucleotide comprising or consisting of a fragment of the sequence of SEQ ID NO: 23 or 25, or the reverse complement, comprising at least 12, preferably at least 15, more preferably at least 18 contiguous nucleotides and comprising Y, preferably as the most 3′ or second most 3′ nucleotide. Preferably said oligonucleotide is a primer.

[0138] In an aspect, the invention relates to a (synthetic) oligonucleotide comprising or consisting of the sequence of SEQ ID NO: 47 or 48, or the reverse complement, or a fragment thereof comprising at least 12, preferably at least 15, more preferably at least 18 contiguous nucleotides. Preferably said oligonucleotide is a primer.

[0139] It will be understood that when referring to “Y” in the above oligonucleotides, such is meant to be C or T and refers to the Y position as present in the indicated SEQ ID NOs.

[0140] The (oligo)nucleotides described above can be used in the methods according to the invention as described herein, such as the methods for identifying a (desired) allelic variation, for selecting an individual comprising a (desired) allelic variation, or for generating an individual comprising a (desired) allelic variation. In certain embodiments, such oligonucleotides have a length as described herein elsewhere. In certain embodiments, the fragments have a length of at least 10 nucleotides, preferably at least 15 nucleotides, more preferably at least 20 nucleotides.

[0141] The aspects and embodiments of the invention are further supported by the following non-limiting examples.

### EXAMPLES

TABLE 1
description of the sequences used herein

| SEQ ID NO | Description |
|---|---|
| SEQ ID NO: 1 | genomic DNA of wild type epsps gene |
| SEQ ID NO: 2 | cDNA of wild type epsps gene |
| SEQ ID NO: 3 | exon 2 of wild type epsps gene |
| SEQ ID NO: 4 | wild type EPSPS protein |
| SEQ ID NO: 5 | genomic DNA of mutant epsps gene (T102I) |
| SEQ ID NO: 6 | cDNA of mutant epsps gene (T102I) |
| SEQ ID NO: 7 | exon 2 of mutant epsps gene (T102I) |
| SEQ ID NO: 8 | mutant EPSPS protein (T102I) |
| SEQ ID NO: 9 | genomic DNA of mutant epsps gene (P106S) |
| SEQ ID NO: 10 | cDNA of mutant epsps gene (P106S) |
| SEQ ID NO: 11 | exon 2 of mutant epsps gene (P106S) |
| SEQ ID NO: 12 | mutant EPSPS protein (P106S) |
| SEQ ID NO: 13 | genomic DNA of mutant epsps gene (T102I and P106S) |
| SEQ ID NO: 14 | cDNA of mutant epsps gene (T102I and P106S) |
| SEQ ID NO: 15 | exon 2 of mutant epsps gene (T102I and P106S) |
| SEQ ID NO: 16 | mutant EPSPS protein (T102I and P106S) |
| SEQ ID NO: 17 | marker BvEPSPS T102I |
| SEQ ID NO: 18 | marker BvEPSPS P106S |
| SEQ ID NO: 19 | synthetic oligo simulating SNP leading to P106S mutation of |
| | BvEPSPS |
| SEQ ID NO: 20 | synthetic oligo simulating SNP leading to T102I mutation of |
| | BvEPSPS |
| SEQ ID NO: 21 | genomic DNA of wild type pol theta gene |
| SEQ ID NO: 22 | genomic DNA of mutant pol theta gene (C→T at position 85) |
| SEQ ID NO: 23 | ma61227s02 |
| SEQ ID NO: 24 | genomic DNA of mutant pol theta gene (C→T at position 221) |
| SEQ ID NO: 25 | ma61227s03 |
| SEQ ID NO: 26 | genomic DNA of mutant pol theta gene (C→T at position 233) |
| SEQ ID NO: 27 | ma61227s04 |
| SEQ ID NO: 28 | genomic DNA of mutant pol theta gene (C→T at position 624) |
| SEQ ID NO: 29 | ma61227s05 |
| SEQ ID NO: 30 | genomic DNA of mutant pol theta gene (C→T at position 630) |
| SEQ ID NO: 31 | ma61227s06 |
| SEQ ID NO: 32 | genomic DNA of mutant pol theta gene (C→T at position 639) |
| SEQ ID NO: 33 | ma61227s07 |
| SEQ ID NO: 34 | genomic DNA of mutant pol theta gene (C→T at position 657) |
| SEQ ID NO: 35 | ma61227s08 |
| SEQ ID NO: 36 | genomic DNA of mutant pol theta gene (C→T at position 699) |
| SEQ ID NO: 37 | ma61227s09 |
| SEQ ID NO: 38 | genomic DNA of mutant pol theta gene (C→T at position 702) |
| SEQ ID NO: 39 | ma61227s10 |
| SEQ ID NO: 40 | genomic DNA of mutant pol theta gene (C→T at position 859) |
| SEQ ID NO: 41 | ma61227s11 |
| SEQ ID NO: 42 | synthetic oligo simulating C85T mutation of pol theta gene of Zea |
| | mays |
| SEQ ID NO: 43 | synthetic oligo simulating C221T mutation of pol theta gene of Zea |
| | mays |
| SEQ ID NO: 44 | common primer for marker BvEPSPS T102I or marker BvEPSPS |
| | P106S |
| SEQ ID NO: 45 | reverse sequence of SEQ ID NO: 19 |
| SEQ ID NO: 46 | reverse sequence of SEQ ID NO: 20 |
| SEQ ID NO: 47 | common primer for marker ma61227s02 |
| SEQ ID NO: 48 | common primer for marker ma61227s03 |
| SEQ ID NO: 49 | reverse sequence of SEQ ID NO: 42 |
| SEQ ID NO: 50 | reverse sequence of SEQ ID NO: 43 |
| SEQ ID NO: 51 | fragment of SEQ ID NO: 19 |
| SEQ ID NO: 52 | fragment of SEQ ID NO: 20 |
| SEQ ID NO: 53 | fragment of SEQ ID NO: 42 |
| SEQ ID NO: 54 | fragment of SEQ ID NO: 43 |

### Example 1: Screening for SNPs Leading to Amino Acid Exchanges

[0143] Natural occurring tolerance against the herbicide glyphosate is caused by amino acid exchanges in the 5-enolpyruvylshikimate-3-phosphate synthase enzyme. Two DNA polymorphisms have been described based on glyphosate resistant weeds (Yu Q., Jalaludin A., Han H., Chen M., Sammons R. D. & Powles S. B. (2015): Evolution of a double amino acid substitution in the 5-enolpyruvylshikimate-3-phosphate synthase in Eleusine indica conferring high-level glyphosate resistance. Plant Physiol. 167, 1440-1447). Both the EPSPS proline to serine exchange at amino acid 106 (P106S, position is referenced to EPSPS Arabidopsis thaliana, corresponding to position 179 in EPSPS of Beta vulgaris) and threonine to isoleucine exchange at amino acid 102 (T1021, position is referenced to EPSPS Arabidopsis thaliana, corresponding to position 175 in EPSPS of Beta vulgaris) are based on C to T mutations in the sequence of BvEPSPS (SEQ ID NO: 1).

[0144] Sugar beet germplasm was mutagenized using EMS and ENU to induce DNA base pair mutations to generate both mutations in sugar beet (detailed description see below). Statistical calculations, that are not described here, indicated that in total up to 30 million individual M2-mutants need to be screened to find the desired mutations with a 70% chance.

[0145] Detailed Description of Mutagenesis of Sugar Beets:

[0146] Several kg Seeds of sugar beet elite line T807 (3BT1760, M0 population) were mutagenized with 0.5% EMS and 0.3% and 0.5%, respectively ENU and subsequently drilled for steck production. Stecks were replanted in the following year for seed production. M1 population sizes were 75,000 seed producing plants for EMS and 19,000 plants for ENU mutagenized seeds. We obtained the following M2 seed amounts (values given for purified seed): 240 kg for 0.5% EMS (ident A), 548 kg for 0.3% ENU (ident B), and 256 kg 0.5% ENU (ident C).

[0147] 176 kg of ident A and 75 kg of idents B and C were sown on a field site. After one month the entire field was sprayed with 0.88 I/ha ROUNDUP MAX (679 g/I active ingredient).

[0148] This treatment of 35 million mutants with glyphosate in the field revealed a total amount of approximately 500 candidate plants to be tolerant against glyphosate (=0.0014%). To check whether or not the selected mutants carry either the T1021 (SEQ ID NOs: 5-8) or P106S mutation (SEQ ID NOs: 9-13), KASP markers for the respective C/T polymorphisms were developed (Table 2). Sequences for both markers are provided in SEQ ID NOs: 17 and 18 wherein ‘Y’ in the sequence indicates the SNP to be detected. That means for instances that from SEQ ID NO: 17 one primer carrying a ‘C’ at the position of ‘Y’ is able to detect the non-mutated epsps gene and another primer carrying a ‘T’ is able to detect the mutated epsps gene. In principle, it is also possible to use the complementary sequences of SEQ ID NOs: 17 and 18, also called the reverse sequences, which are directed to the other genomic DNA strand. If used as KASP marker additionally a common primer is needed, which can be for example SEQ ID NO: 44 or the complementary sequence thereof. To test the KASP assay prior to application on the mutants, two synthetic DNA oligos were designed and synthetized (SEQ ID NOs: 19 and 20). Since the synthetic DNA oligos are double stranded molecules the corresponding reverse strands are set forth in SEQ ID NO: 45 and 46, respectively. They comprise up to 120 bp of the sugar beet EPSPS (BvEPSPS) genomic sequence carrying either base T or base C at the respective positions. These synthetic oligos served as a template to test the KASP assay quality and capacity to differentiate between both alleles in particular in presence of background sugar beet DNA. After this validation step, these KASP markers have been used to detect the desired mutations on the 500 glyphosate tolerant candidate plants. As it turned out, one plant carried the desired P106S mutation (=0.000003%; 1 out of 35,000,000). Efficiency and quality of the method was tested by Sanger sequencing of exon 2 of the BvEPSPS in all 500 glyphosate tolerant plants (SEQ ID NOs: 3 and 11). Presence of the P106S mutation in the one individual identified by KASP markers was confirmed and absence of this polymorphism in all other plants was confirmed, too.

TABLE 2
KASP markers designed for the detection and the differentiation of
mutant alleles for glyphosate resistance in Beta vulgaris DNA
background. Exemplary, as common primer a sequence as set forth
in SEQ ID NO: 44 or a complementary sequence thereof can be used.

| | | | | Exemplary |
|---|---|---|---|---|
| | | Length | Position of C→T | detectable |
| | | of the | mutation in epsps | mutant sequence |
| | SEQ ID | marker | gene of B. vulgaris | of epsps |
| marker name | NO: | (bp) | (SEQ ID NO: 1) | (SEQ ID NO) |
| BvEPSPS T102I | 17 | 61 | 3037 | 5; 13 |
| BvEPSPS P106S | 18 | 61 | 3048 | 9; 13 |

[0149] As another example, several amino acid substitution mutations in CENH3 are known to cause haploid induction in plants like rapeseed and Arabidopsis (EP 3 186 381, EP 3 237 623). Transfer of this technology to other crops, especially to maize, sunflower or sugar beet is of high interest. As CENH3 is highly conserved within the plant kingdom, it is possible to identify the amino acids of interest in other crops in sequence alignments. Depending on the mutagenic agent used to establish the mutagenized population, different nucleotide exchanges can be expected, which can be translated into amino acid exchanges. The most common are (Silkara P, Chawade A., Larsson M., Olsson J., Olsson O. (2011): Mutagenesis as a tool in plant genetics, functional genomics, and breeding. Int J Plant Genomics. 2011:314829):
[0150] EMS: C→T and G→A
[0151] ENU: C→T, G→A, A→T and T→A
[0152] Az-MNU: C→T, G→A, A→G and T→C

[0153] The most frequent nucleotide exchanges in a specific population likely depends on species, treatment and variety and must be determined by sequencing. If a desired DNA polymorphism can be introduced by mutagenesis of a certain mutagen/genotype population, KASP markers on such mutations can be developed as shown above and can significantly improve the screening process for desired mutations in the TILLING population.

### Example 2: Screening for SNPs Leading to Pre-Mature Stop of Translation

[0154] Except for very specific mutations as shown for EPSPS and CENH3, the most frequent application of this technology will be the search/screen for knock-out mutations. For example, by EMS mutagenesis, the following five codons can be converted to stop codons: CAA, CAG, TGG, CGA and TGG. If 10 markers for potential stop codons are designed in the first half of the protein of interest, the probability to detect at least one knock out mutant in 10,000 plants in a tilling population of any crop with a mutation frequency of 1 mutation in 150 kb is between 70 and 80% depending on the GC content of the gene. In this example, the method is applied for instances to identify knock-out mutations for the gene of polymerase theta (Pol theta) in corn (Zea mays). Such germplasm with a deficient Pol theta shows a reduction of non-homologous recombination and of stabile integration of T-DNA during a transformation process (WO 2017164738).

[0155] For the validation of KASP assays according to the present invention for mutagenic agent-based TILLING approaches the DNA sequence of Pol theta gene (SEQ ID NO: 21) derived from Maize genotype PH207 (as described in “Draft Assembly of Elite Inbred Line PH207 Provides Insights into Genomic and Transcriptome Diversity in Maize”, Hirsch et al., Plant Cell. 2016 November; 28(11): 2700-2714. Published online 2016 Nov. 1. doi: 10.1105/tpc.16.00353) which should include the desired knock-out mutation as SNP, was used to design primers for the KASP analysis with the algorithm included in the KRAKEN software package of LGC Genomics (www.lgcgroup.com/products/genotyping-software/kraken/). Two synthetic oligos in forward (SEQ ID NOs: 42 and 43) and reverse complement direction (SEQ ID NOs: 49 and 50) were subsequently generated covering exemplary the sequence of the design of ma61227s02 and ma61227s03s (Table 3) and carrying the desired nucleotide for the knock-out mutation. In this example the knock-out mutations base on the exchange of a cytosine (C) for a thymine (T) (C→T) which can be made by any of above mentioned mutagenic agents. Both synthetic oligos were mixed in an equimolar ratio and used for KASP-analysis in an end concentration of 0.01 pM as well as spiked in genomic DNA of a wildtype genotype to simulate heterozygous pattern.

TABLE 3
KASP markers designed for the detection knock-out mutant alleles for Pol Theta
in Zea mays DNA background. Exemplary for ma61227s02, as common primer a
sequence as set forth in SEQ ID NO: 47 or a complementary sequence thereof
can be used. Exemplary for ma61227s03, as common primer a sequence as set
forth in SEQ ID NO: 48 or a complementary sequence thereof can be used.

| | | | | Position of C→T | Exemplary |
|---|---|---|---|---|---|
| | | | | mutation in Pol | detectable |
| | | | Length | theta gene | mutant sequence |
| KASP | marker | SEQ ID | of the | (referenced to | of pol theta |
| Design | name | NO: | marker | SEQ ID NO: 21) | (SEQ ID NO) |
| 1 | ma61227s02 | 23 | 152 | 85 | 22 |
| 2 | ma61227s03 | 25 | 154 | 221 | 24 |
| | ma61227s04 | 27 | 154 | 233 | 26 |
| 3 | ma61227s05 | 29 | 156 | 624 | 28 |
| | ma61227s06 | 31 | 156 | 630 | 30 |
| | ma61227s07 | 33 | 154 | 639 | 32 |
| | ma61227s08 | 35 | 149 | 657 | 34 |
| | ma61227s09 | 37 | 138 | 699 | 36 |
| | ma61227s10 | 39 | 138 | 702 | 38 |
| 4 | ma61227s11 | 41 | 145 | 859 | 40 |

[0156] The KASP-design with the best separation of the clusters with homozygous synthetic template, the heterozygous spiked samples and the cluster with homozygous wildtype allele were then chosen to analyse a produced maize TILLING population.

The application's sequence listing, which the Patent Office published only in electronic form, follows.

SEQUENCE LISTING (54 sequences)

SEQ ID NO: 1 - DNA, 7001 bp, Beta vulgaris
aggaagtatttgaatttgatatagatattgtgtctttgtgtgtgttgaatttcaattcccagttccctaaaaaaaatttacaattgcaatttcgagattatgatgtaaattaaatttgagagactagaaagtatttggtcaacccaaaaaaaaaatatcaatacttatataaatcaaaaacataatagagaatccaattttactaaaaatattagtaattttgattaaaataatctattaaaatgaactctaaccttcacataatttccacatattattaatcaacaaaataagcatcacaaattattagaataggcgatctaattttaacataaaattagacgaattcaaattgaatttttctaacaagctcattccatttcacgcaacccaaaattatcctagtcagtagtcatccattcttttctcattcctttattcttgattatcgaactacaacagataatttcaaaaaaaaactaaattggtagtcttaactgattaaactacttactaaatggattaaagaatgtcattactgaatagattaaactgattacgaaatagattaacttggtccctaaatagattaaattagttactatattaaaattaggcgatctcttacaaaaccaactgaataagcatagctctgtatattacctagatttcaactaaatcaaaaccccttacagttcaatctagagctgatcattttggctcggcccgtcccatttttgggccgggttttagtcagatttttttggcccgcggtcgggcccggcccgatttttttggctttgggcaagccaaaaacgacttttcagtttattttttggcccgacccgtttttacccgcaaaagcccgctaatttaggtccgcactttgggcacaaaaatttagcccgaacttaaacctggcccgacccatgatcacctctagtttaatccaaactaaaaaactacacaagttagccaaaaattatgtctactttgtacaactttataaaatacacacagtagttgatatcttgatgattaactccttttgaagtttgactacacaccaaccccaaacacacccactttttcccccctcttgtcaccaaccccccctcctctttagccaccaaagtttggttggtgagtcctccataactgctaaattctctcttttttctctctcctaaaaaactaaaacccaccaaaatttcagacatcaaaaaaattacaagtgaaggaaacaataatggctcaagctagcaccataaacaatggtgtcaaaagcacccaattatgccccaatttacccaaaacccacttatccaaatcttcaaaatctgttaaatttggatcaaatttgagattttctccaaagttgaaatcttttaacaatgaaagagttggtgggaattcatcagttgttttcagggttagggcttcagttgcagcagcagctgaaaaatcatcaactgtaccagaaattgtgttacaacccatcaaagagatctcgggtaccattcaattgcccggatccaagtcattatctaatcggattctacttcttgctgccctttctcaggtacttttcaattgtttgatttctttttttcttagaacttgtgaatttgtatactttatccgtttctaaatacgtgcaacatttgaatagtaacgagtatttatctaccaacttatttaatattctctcacgaatgtatatgaaaaaatatagtcatgcgtggttttatttgattgatctgcggacttttataatatcaactttttataatttagaggacaaagtagtgtattgggtagcgtgtaaggaggttgggaaactggaggaattttttaacaattcaagtttgatatttttcatagtgaaatgtttattagcatagaatcatgcttttagtttttagtggagtgtgcatttattctttaacttgttggatggctatgattaagaattggattctggttatttgcttgagtatttagaaattaattgtgggtgttggtgataatgtaacaaaattgttttgaaggtgtgagaatgtgattttaattatatgaggaaatgatgggttatttattgtaatgtgggaatttatgataatatgttggaggatgaaacaattgatgattttgaagtggggtatgaaggctttcccccatttttttacctttcatgtgttgtatgtagcagactgccaaagcaattcttctgagcagcttggcatatttccattgcaactcataatctcaatccaagcacaatcaattacctgccacgctagcactttaagtagcaaaatcgcgcttgaagaaaagataataccacaggcttctatagttctattccttgtgatataggacacaagtatcatcctagatgacttccctagccctgcaaataattcctggaaggaagtccgttgagtatccttgatcaagtaaaattagcgctttcttttgggtaacacaaactatactcgaaccactttatgctaagggatcacattgcgtctcttgcagaacttttaacatttctaacatggcataagcacggaaacaccctgtgaagttgctagtgaccatcttttttgataaatcaagaatccctgttcttatttgcatacaaagggttaagtcttgtctgagagggattgacatatctcctgctggatagactttgtgttcatctctaatgttattctgagtttgcattgtatgtgttgtgttttcgtttttcttcttgtttgtgtgtgtgtgtgtgtgtgtgtgtgtgtgttacccaaacttgtacggaaatttccatcctaacgagaattatgctgcagggaacaacagtggttgacaacttgctatatagtgatgatatccgttacatgctggatgctttgagaactcttgggttgaatgtggaggatgataatatagccaaaagggcaatcgtggagggttgcggtggtttgtttcctgttggaaaagatgggaaagaaattgaactttttcttggaaatgcaggaacagcaatgcgcccattgacagctgcagttgctgttgctggaggaaattctaggtttgtctactaaggccttccatgtcatcgtgaggctgttaatattcttttattttgtgtggagacttgtttcctcttgctacaattgcaaagggggctgggattgattaacaatgcagaactcaaacactatctttggtatcaccgtctggcaggtggcatctgatcttgcaaaacagatatggagggttttgccggaaaggggttgggggtgggacttgggagtatagcctcaatgttatagaagattgtgctatactactgtaaaattaacttttggttggaaccagatatagttaataaagtatttttttatctggtgaggggtgcttctaggtcctgaaaagttccaccatagaaaaaaattgaatttcattgtgaaaagctaaggtgaattcattaaattcaatacatgttgttgattgcttgaactagaatacttcagatatcagttaattgaatttatttcttttggagaacatgcatgaagagcttttaactcgcctctactatcctgctcttaattatttttataaatagatttagcaattgggaatatcctgtaatttgctggttgctttttcatatggtatatattgaattggtgtggaggcgttttacaaagagtgaaggtaattgttgatgggtggatattgaatggaaatactttgatggcggatagcatattcatctgattggatgtctgaaatttgatgagctctagtaaatgttcctccatgtatgcttgtgtattgggaatttgcaatccagtagtagagaacacccctgataattgcactattattcctgagttgtgagagctctcaagaagatagatggggttcttcaagttttttaattgtctttaggtagtgtaaaggttgcaatatttcaaaggatctgtctgatccaacaagtctgctaaatccttcaccaatctgaaaggggagaagatactgctctctctgacctgcttgcatgcatataaagcttctaaaacaaataggttaaatgtaaaacaagcgcagaagttttcacttctcttgggaaatgtgtgccaagatctattgcatgacatgaattcatatttattgattatatgctcaacatgaatgggattaagaatgaaataaagtagcatgagtaggagacaatccgcctgctcttttaataggcatatacaatcagtcatcaacatcattgctgctttagaatttgatttatgttgatcttggtttttgcagctatgtacttgatggagtgccgagaatgagggagcgacccattggggatttggtagcgggtctaaagcaacttggcgccgatgttgactgttatcttggcacaaattgtcctcctgttcgagtgaatgctaaaggaggccttcccgggggcaaggtgaattctcttgttttgattagagaaaaattataagttagtgttctatcatgcttgacacgaacaagtttttttatctgaaagagaaagaagtgtatgcctaatgattaacagtcatattcaaaatgatataaaagagggtggaaggttacttgctctatgatgatttatggtagtaccgtgttaccaatagcagaattcaagcaatattctttgaactggtaataacaagttcaagcaatcaagcatagtttagattagattctatcaatctcttagcatagtttaaattcgcttccatcaatctcttttgtgacgtaagaagttctgttccattatacttatgctttttgtgaaattttatttgcaggtcaagctctctggatcagttagtagccaatatttgactgcactgcttatggctactcctttgggtcttggagacgtggaggttgaaatcattgataaattgatttctgtaccatatgtggagatgacaataaagctaatggaaaggtttggagtgtctgtagagcatagtgctgactggggtaggttcttgatccgaggtggtcagaagtacaagtaagtctctcttttttactacgtgtcctgaaaaatctatgttttagtagactaagatactataaaatacatcagatctcctggaaatgcgtatgttgagggtgatgcttcaagtgctagttacttcataggaggggccgcagtcactggtgggactgtgactgttgagggttgtggaacaagtagtttacaggtatgatttaaagccttatttcacatccttttacttctctccttactgcatctcagcttaattctgaagaactcttgttgctcaatctctaggcataagcttgttctttcgaccttctaaatttgcaaaatcattctgttaatgtaacaaacagaagatgagatggtgtttttgatcctgataaaaaaaattaggacattcatgattggtttatgttctatgacaatttcgatgatctcttcaattgtaacttgaggacccttttctgctagtaaagattgtgtataagctattctagactgttgtatacacctcatattccggtattgtttatacctaataaacttcttatgattagtatcttacttgtctcatgtgttttgcatagggtgatgtaaaatttgctgaagttcttgagaagatgggttgcaaggtatcctggacagagaacagtgtcactgtcactggaccacccagggatgcatctggaagaaaacacttgcgcgccgttgatgtcaacatgaacaaaatgccagatgttgcaatgactcttgctgttgttgctctttatgcagatggacccaccaccattagagacggtatgcttaattcctttctgtgaacatgacactcttcttgtgccataggtagattccgtagttattggtcacaatccaaatttgcattggtatttaaagcaagtcttaggtggtgagaccgcttgaaacccataatataaaagaaaggtcaccttggtctcaaagttaattcttgtgagaccatctcatgcaagattttgccgggtatctaatccttgtttgcactgaggaaaaggaaaaaaattaacatgacctattagtaagccaaaaaaattctaacaagagaagtagccgaataggtaataatttttgtgatataatgatcagtggctagctggagagtgaaggaaacagaacggatgattgcgatttgcacagagctcagaaaggttagccattttggatatacacattcttgaaggttttcaaccttgtagaagattgtactattgataaaaaaaattgatgtttatccggtgtacttcgaaatttcttttcagctgggggcaacagttgaggaaggatcagattactgtgtgatcactccacctgagaaactaaatgtgacggccattgatacatacgatgatcaccgaatggccatggcattctctcttgctgcctgcgccgatgttcctgttaccatcaaggacccgggttgcactcgcaagactttcccagactactttgatgtgttggaaaggtttgcaaagcattaagtggtctcctacatattctataaagcataagctgagattttttgagagaattaggagatgaaaaatgctttctgcttgagttatcatcacattctttgtattatgattgtaagattattatagtatagagtttacaaagtactactaataattgttatgtatccgattgatcagaaataagttaattggaaggctggactttgaaaatgtgaccaagacactagtgtgaccaagtcattttgttaatgtgagttcaatgttattgattcaacatgtagagccaaatctcaattctatcgtcacttcatatgaccaaaaatctaaagatgaaaaagtaaaaaagagcatgttggatcaaactctagctgtatctctgaaattcaatcacgcagttagatcaaatgaggattaaagggagt

SEQ ID NO: 2 - DNA, 1554 bp, Artificial Sequence
  cDNA of wildtype BvEPSPS
atggctcaagctagcaccataaacaatggtgtcaaaagcacccaattatgccccaatttacccaaaacccacttatccaaatcttcaaaatctgttaaatttggatcaaatttgagattttctccaaagttgaaatcttttaacaatgaaagagttggtgggaattcatcagttgttttcagggttagggcttcagttgcagcagcagctgaaaaatcatcaactgtaccagaaattgtgttacaacccatcaaagagatctcgggtaccattcaattgcccggatccaagtcattatctaatcggattctacttcttgctgccctttctcagggaacaacagtggttgacaacttgctatatagtgatgatatccgttacatgctggatgctttgagaactcttgggttgaatgtggaggatgataatatagccaaaagggcaatcgtggagggttgcggtggtttgtttcctgttggaaaagatgggaaagaaattgaactttttcttggaaatgcaggaacagcaatgcgcccattgacagctgcagttgctgttgctggaggaaattctagctatgtacttgatggagtgccgagaatgagggagcgacccattggggatttggtagcgggtctaaagcaacttggcgccgatgttgactgttatcttggcacaaattgtcctcctgttcgagtgaatgctaaaggaggccttcccgggggcaaggtcaagctctctggatcagttagtagccaatatttgactgcactgcttatggctactcctttgggtcttggagacgtggaggttgaaatcattgataaattgatttctgtaccatatgtggagatgacaataaagctaatggaaaggtttggagtgtctgtagagcatagtgctgactggggtaggttcttgatccgaggtggtcagaagtacaaatctcctggaaatgcgtatgttgagggtgatgcttcaagtgctagttacttcataggaggggccgcagtcactggtgggactgtgactgttgagggttgtggaacaagtagtttacagggtgatgtaaaatttgctgaagttcttgagaagatgggttgcaaggtatcctggacagagaacagtgtcactgtcactggaccacccagggatgcatctggaagaaaacacttgcgcgccgttgatgtcaacatgaacaaaatgccagatgttgcaatgactcttgctgttgttgctctttatgcagatggacccaccaccattagagacgtggctagctggagagtgaaggaaacagaacggatgattgcgatttgcacagagctcagaaagctgggggcaacagttgaggaaggatcagattactgtgtgatcactccacctgagaaactaaatgtgacggccattgatacatacgatgatcaccgaatggccatggcattctctcttgctgcctgcgccgatgttcctgttaccatcaaggacccgggttgcactcgcaagactttcccagactactttgatgtgttggaaaggtttgcaaagcattaa

SEQ ID NO: 3 - DNA, 243 bp, Beta vulgaris
cagggaacaacagtggttgacaacttgctatatagtgatgatatccgttacatgctggatgctttgagaactcttgggttgaatgtggaggatgataatatagccaaaagggcaatcgtggagggttgcggtggtttgtttcctgttggaaaagatgggaaagaaattgaactttttcttggaaatgcaggaacagcaatgcgcccattgacagctgcagttgctgttgctggaggaaattct

SEQ ID NO: 4 - protein, 517 aa, Beta vulgaris
MAQASTINNGVKSTQLCPNLPKTHLSKSSKSVKFGSNLRFSPKLKSFNNERVGGNSSVVFRVRASVAAAAEKSSTVPEIVLQPIKEISGTIQLPGSKSLSNRILLLAALSQGTTVVDNLLYSDDIRYMLDALRTLGLNVEDDNIAKRAIVEGCGGLFPVGKDGKEIELFLGNAGTAMRPLTAAVAVAGGNSSYVLDGVPRMRERPIGDLVAGLKQLGADVDCYLGTNCPPVRVNAKGGLPGGKVKLSGSVSSQYLTALLMATPLGLGDVEVEIIDKLISVPYVEMTIKLMERFGVSVEHSADWGRFLIRGGQKYKSPGNAYVEGDASSASYFIGGAAVTGGTVTVEGCGTSSLQGDVKFAEVLEKMGCKVSWTENSVTVTGPPRDASGRKHLRAVDVNMNKMPDVAMTLAVVALYADGPTTIRDVASWRVKETERMIAICTELRKLGATVEEGSDYCVITPPEKLNVTAIDTYDDHRMAMAFSLAACADVPVTIKDPGCTRKTFPDYFDVLERFAKH

SEQ ID NO: 5 - DNA, 7001 bp, Artificial Sequence
  genomic DNA of mutant BvEPSPS (T102I)
aggaagtatttgaatttgatatagatattgtgtctttgtgtgtgttgaatttcaattcccagttccctaaaaaaaatttacaattgcaatttcgagattatgatgtaaattaaatttgagagactagaaagtatttggtcaacccaaaaaaaaaatatcaatacttatataaatcaaaaacataatagagaatccaattttactaaaaatattagtaattttgattaaaataatctattaaaatgaactctaaccttcacataatttccacatattattaatcaacaaaataagcatcacaaattattagaataggcgatctaattttaacataaaattagacgaattcaaattgaatttttctaacaagctcattccatttcacgcaacccaaaattatcctagtcagtagtcatccattcttttctcattcctttattcttgattatcgaactacaacagataatttcaaaaaaaaactaaattggtagtcttaactgattaaactacttactaaatggattaaagaatgtcattactgaatagattaaactgattacgaaatagattaacttggtccctaaatagattaaattagttactatattaaaattaggcgatctcttacaaaaccaactgaataagcatagctctgtatattacctagatttcaactaaatcaaaaccccttacagttcaatctagagctgatcattttggctcggcccgtcccatttttgggccgggttttagtcagatttttttggcccgcggtcgggcccggcccgatttttttggctttgggcaagccaaaaacgacttttcagtttattttttggcccgacccgtttttacccgcaaaagcccgctaatttaggtccgcactttgggcacaaaaatttagcccgaacttaaacctggcccgacccatgatcacctctagtttaatccaaactaaaaaactacacaagttagccaaaaattatgtctactttgtacaactttataaaatacacacagtagttgatatcttgatgattaactccttttgaagtttgactacacaccaaccccaaacacacccactttttcccccctcttgtcaccaaccccccctcctctttagccaccaaagtttggttggtgagtcctccataactgctaaattctctcttttttctctctcctaaaaaactaaaacccaccaaaatttcagacatcaaaaaaattacaagtgaaggaaacaataatggctcaagctagcaccataaacaatggtgtcaaaagcacccaattatgccccaatttacccaaaacccacttatccaaatcttcaaaatctgttaaatttggatcaaatttgagattttctccaaagttgaaatcttttaacaatgaaagagttggtgggaattcatcagttgttttcagggttagggcttcagttgcagcagcagctgaaaaatcatcaactgtaccagaaattgtgttacaacccatcaaagagatctcgggtaccattcaattgcccggatccaagtcattatctaatcggattctacttcttgctgccctttctcaggtacttttcaattgtttgatttctttttttcttagaacttgtgaatttgtatactttatccgtttctaaatacgtgcaacatttgaatagtaacgagtatttatctaccaacttatttaatattctctcacgaatgtatatgaaaaaatatagtcatgcgtggttttatttgattgatctgcggacttttataatatcaactttttataatttagaggacaaagtagtgtattgggtagcgtgtaaggaggttgggaaactggaggaattttttaacaattcaagtttgatatttttcatagtgaaatgtttattagcatagaatcatgcttttagtttttagtggagtgtgcatttattctttaacttgttggatggctatgattaagaattggattctggttatttgcttgagtatttagaaattaattgtgggtgttggtgataatgtaacaaaattgttttgaaggtgtgagaatgtgattttaattatatgaggaaatgatgggttatttattgtaatgtgggaatttatgataatatgttggaggatgaaacaattgatgattttgaagtggggtatgaaggctttcccccatttttttacctttcatgtgttgtatgtagcagactgccaaagcaattcttctgagcagcttggcatatttccattgcaactcataatctcaatccaagcacaatcaattacctgccacgctagcactttaagtagcaaaatcgcgcttgaagaaaagataataccacaggcttctatagttctattccttgtgatataggacacaagtatcatcctagatgacttccctagccctgcaaataattcctggaaggaagtccgttgagtatccttgatcaagtaaaattagcgctttcttttgggtaacacaaactatactcgaaccactttatgctaagggatcacattgcgtctcttgcagaacttttaacatttctaacatggcataagcacggaaacaccctgtgaagttgctagtgaccatcttttttgataaatcaagaatccctgttcttatttgcatacaaagggttaagtcttgtctgagagggattgacatatctcctgctggatagactttgtgttcatctctaatgttattctgagtttgcattgtatgtgttgtgttttcgtttttcttcttgtttgtgtgtgtgtgtgtgtgtgtgtgtgtgtgttacccaaacttgtacggaaatttccatcctaacgagaattatgctgcagggaacaacagtggttgacaacttgctatatagtgatgatatccgttacatgctggatgctttgagaactcttgggttgaatgtggaggatgataatatagccaaaagggcaatcgtggagggttgcggtggtttgtttcctgttggaaaagatgggaaagaaattgaactttttcttggaaatgcaggaatagcaatgcgcccattgacagctgcagttgctgttgctggaggaaattctaggtttgtctactaaggccttccatgtcatcgtgaggctgttaatattcttttattttgtgtggagacttgtttcctcttgctacaattgcaaagggggctgggattgattaacaatgcagaactcaaacactatctttggtatcaccgtctggcaggtggcatctgatcttgcaaaacagatatggagggttttgccggaaaggggttgggggtgggacttgggagtatagcctcaatgttatagaagattgtgctatactactgtaaaattaacttttggttggaaccagatatagttaataaagtatttttttatctggtgaggggtgcttctaggtcctgaaaagttccaccatagaaaaaaattgaatttcattgtgaaaagctaaggtgaattcattaaattcaatacatgttgttgattgcttgaactagaatacttcagatatcagttaattgaatttatttcttttggagaacatgcatgaagagcttttaactcgcctctactatcctgctcttaattatttttataaatagatttagcaattgggaatatcctgtaatttgctggttgctttttcatatggtatatattgaattggtgtggaggcgttttacaaagagtgaaggtaattgttgatgggtggatattgaatggaaatactttgatggcggatagcatattcatctgattggatgtctgaaatttgatgagctctagtaaatgttcctccatgtatgcttgtgtattgggaatttgcaatccagtagtagagaacacccctgataattgcactattattcctgagttgtgagagctctcaagaagatagatggggttcttcaagttttttaattgtctttaggtagtgtaaaggttgcaatatttcaaaggatctgtctgatccaacaagtctgctaaatccttcaccaatctgaaaggggagaagatactgctctctctgacctgcttgcatgcatataaagcttctaaaacaaataggttaaatgtaaaacaagcgcagaagttttcacttctcttgggaaatgtgtgccaagatctattgcatgacatgaattcatatttattgattatatgctcaacatgaatgggattaagaatgaaataaagtagcatgagtaggagacaatccgcctgctcttttaataggcatatacaatcagtcatcaacatcattgctgctttagaatttgatttatgttgatcttggtttttgcagctatgtacttgatggagtgccgagaatgagggagcgacccattggggatttggtagcgggtctaaagcaacttggcgccgatgttgactgttatcttggcacaaattgtcctcctgttcgagtgaatgctaaaggaggccttcccgggggcaaggtgaattctcttgttttgattagagaaaaattataagttagtgttctatcatgcttgacacgaacaagtttttttatctgaaagagaaagaagtgtatgcctaatgattaacagtcatattcaaaatgatataaaagagggtggaaggttacttgctctatgatgatttatggtagtaccgtgttaccaatagcagaattcaagcaatattctttgaactggtaataacaagttcaagcaatcaagcatagtttagattagattctatcaatctcttagcatagtttaaattcgcttccatcaatctcttttgtgacgtaagaagttctgttccattatacttatgctttttgtgaaattttatttgcaggtcaagctctctggatcagttagtagccaatatttgactgcactgcttatggctactcctttgggtcttggagacgtggaggttgaaatcattgataaattgatttctgtaccatatgtggagatgacaataaagctaatggaaaggtttggagtgtctgtagagcatagtgctgactggggtaggttcttgatccgaggtggtcagaagtacaagtaagtctctcttttttactacgtgtcctgaaaaatctatgttttagtagactaagatactataaaatacatcagatctcctggaaatgcgtatgttgagggtgatgcttcaagtgctagttacttcataggaggggccgcagtcactggtgggactgtgactgttgagggttgtggaacaagtagtttacaggtatgatttaaagccttatttcacatccttttacttctctccttactgcatctcagcttaattctgaagaactcttgttgctcaatctctaggcataagcttgttctttcgaccttctaaatttgcaaaatcattctgttaatgtaacaaacagaagatgagatggtgtttttgatcctgataaaaaaaattaggacattcatgattggtttatgttctatgacaatttcgatgatctcttcaattgtaacttgaggacccttttctgctagtaaagattgtgtataagctattctagactgttgtatacacctcatattccggtattgtttatacctaataaacttcttatgattagtatcttacttgtctcatgtgttttgcatagggtgatgtaaaatttgctgaagttcttgagaagatgggttgcaaggtatcctggacagagaacagtgtcactgtcactggaccacccagggatgcatctggaagaaaacacttgcgcgccgttgatgtcaacatgaacaaaatgccagatgttgcaatgactcttgctgttgttgctctttatgcagatggacccaccaccattagagacggtatgcttaattcctttctgtgaacatgacactcttcttgtgccataggtagattccgtagttattggtcacaatccaaatttgcattggtatttaaagcaagtcttaggtggtgagaccgcttgaaacccataatataaaagaaaggtcaccttggtctcaaagttaattcttgtgagaccatctcatgcaagattttgccgggtatctaatccttgtttgcactgaggaaaaggaaaaaaattaacatgacctattagtaagccaaaaaaattctaacaagagaagtagccgaataggtaataatttttgtgatataatgatcagtggctagctggagagtgaaggaaacagaacggatgattgcgatttgcacagagctcagaaaggttagccattttggatatacacattcttgaaggttttcaaccttgtagaagattgtactattgataaaaaaaattgatgtttatccggtgtacttcgaaatttcttttcagctgggggcaacagttgaggaaggatcagattactgtgtgatcactccacctgagaaactaaatgtgacggccattgatacatacgatgatcaccgaatggccatggcattctctcttgctgcctgcgccgatgttcctgttaccatcaaggacccgggttgcactcgcaagactttcccagactactttgatgtgttggaaaggtttgcaaagcattaagtggtctcctacatattctataaagcataagctgagattttttgagagaattaggagatgaaaaatgctttctgcttgagttatcatcacattctttgtattatgattgtaagattattatagtatagagtttacaaagtactactaataattgttatgtatccgattgatcagaaataagttaattggaaggctggactttgaaaatgtgaccaagacactagtgtgaccaagtcattttgttaatgtgagttcaatgttattgattcaacatgtagagccaaatctcaattctatcgtcacttcatatgaccaaaaatctaaagatgaaaaagtaaaaaagagcatgttggatcaaactctagctgtatctctgaaattcaatcacgcagttagatcaaatgaggattaaagggagt

SEQ ID NO: 6 - DNA, 1554 bp, Artificial Sequence
  cDNA of mutant BvEPSPS (T102I)
atggctcaagctagcaccataaacaatggtgtcaaaagcacccaattatgccccaatttacccaaaacccacttatccaaatcttcaaaatctgttaaatttggatcaaatttgagattttctccaaagttgaaatcttttaacaatgaaagagttggtgggaattcatcagttgttttcagggttagggcttcagttgcagcagcagctgaaaaatcatcaactgtaccagaaattgtgttacaacccatcaaagagatctcgggtaccattcaattgcccggatccaagtcattatctaatcggattctacttcttgctgccctttctcagggaacaacagtggttgacaacttgctatatagtgatgatatccgttacatgctggatgctttgagaactcttgggttgaatgtggaggatgataatatagccaaaagggcaatcgtggagggttgcggtggtttgtttcctgttggaaaagatgggaaagaaattgaactttttcttggaaatgcaggaatagcaatgcgcccattgacagctgcagttgctgttgctggaggaaattctagctatgtacttgatggagtgccgagaatgagggagcgacccattggggatttggtagcgggtctaaagcaacttggcgccgatgttgactgttatcttggcacaaattgtcctcctgttcgagtgaatgctaaaggaggccttcccgggggcaaggtcaagctctctggatcagttagtagccaatatttgactgcactgcttatggctactcctttgggtcttggagacgtggaggttgaaatcattgataaattgatttctgtaccatatgtggagatgacaataaagctaatggaaaggtttggagtgtctgtagagcatagtgctgactggggtaggttcttgatccgaggtggtcagaagtacaaatctcctggaaatgcgtatgttgagggtgatgcttcaagtgctagttacttcataggaggggccgcagtcactggtgggactgtgactgttgagggttgtggaacaagtagtttacagggtgatgtaaaatttgctgaagttcttgagaagatgggttgcaaggtatcctggacagagaacagtgtcactgtcactggaccacccagggatgcatctggaagaaaacacttgcgcgccgttgatgtcaacatgaacaaaatgccagatgttgcaatgactcttgctgttgttgctctttatgcagatggacccaccaccattagagacgtggctagctggagagtgaaggaaacagaacggatgattgcgatttgcacagagctcagaaagctgggggcaacagttgaggaaggatcagattactgtgtgatcactccacctgagaaactaaatgtgacggccattgatacatacgatgatcaccgaatggccatggcattctctcttgctgcctgcgccgatgttcctgttaccatcaaggacccgggttgcactcgcaagactttcccagactactttgatgtgttggaaaggtttgcaaagcattaa

SEQ ID NO: 7 - DNA, 243 bp, Artificial Sequence
  exon 2 of mutant BvEPSPS (T102I)
cagggaacaacagtggttgacaacttgctatatagtgatgatatccgttacatgctggatgctttgagaactcttgggttgaatgtggaggatgataatatagccaaaagggcaatcgtggagggttgcggtggtttgtttcctgttggaaaagatgggaaagaaattgaactttttcttggaaatgcaggaatagcaatgcgcccattgacagctgcagttgctgttgctggaggaaattct

SEQ ID NO: 8 - protein, 517 aa, Artificial Sequence
  mutant EPSPS protein (T102I)
MAQASTINNGVKSTQLCPNLPKTHLSKSSKSVKFGSNLRFSPKLKSFNNERVGGNSSVVFRVRASVAAAAEKSSTVPEIVLQPIKEISGTIQLPGSKSLSNRILLLAALSQGTTVVDNLLYSDDIRYMLDALRTLGLNVEDDNIAKRAIVEGCGGLFPVGKDGKEIELFLGNAGIAMRPLTAAVAVAGGNSSYVLDGVPRMRERPIGDLVAGLKQLGADVDCYLGTNCPPVRVNAKGGLPGGKVKLSGSVSSQYLTALLMATPLGLGDVEVEIIDKLISVPYVEMTIKLMERFGVSVEHSADWGRFLIRGGQKYKSPGNAYVEGDASSASYFIGGAAVTGGTVTVEGCGTSSLQGDVKFAEVLEKMGCKVSWTENSVTVTGPPRDASGRKHLRAVDVNMNKMPDVAMTLAVVALYADGPTTIRDVASWRVKETERMIAICTELRKLGATVEEGSDYCVITPPEKLNVTAIDTYDDHRMAMAFSLAACADVPVTIKDPGCTRKTFPDYFDVLERFAKH

SEQ ID NO: 9 - DNA, 7001 bp, Artificial Sequence
  genomic DNA of mutant BvEPSPS (P106S)
aggaagtatttgaatttgatatagatattgtgtctttgtgtgtgttgaatttcaattcccagttccctaaaaaaaatttacaattgcaatttcgagattatgatgtaaattaaatttgagagactagaaagtatttggtcaacccaaaaaaaaaatatcaatacttatataaatcaaaaacataatagagaatccaattttactaaaaatattagtaattttgattaaaataatctattaaaatgaactctaaccttcacataatttccacatattattaatcaacaaaataagcatcacaaattattagaataggcgatctaattttaacataaaattagacgaattcaaattgaatttttctaacaagctcattccatttcacgcaacccaaaattatcctagtcagtagtcatccattcttttctcattcctttattcttgattatcgaactacaacagataatttcaaaaaaaaactaaattggtagtcttaactgattaaactacttactaaatggattaaagaatgtcattactgaatagattaaactgattacgaaatagattaacttggtccctaaatagattaaattagttactatattaaaattaggcgatctcttacaaaaccaactgaataagcatagctctgtatattacctagatttcaactaaatcaaaaccccttacagttcaatctagagctgatcattttggctcggcccgtcccatttttgggccgggttttagtcagatttttttggcccgcggtcgggcccggcccgatttttttggctttgggcaagccaaaaacgacttttcagtttattttttggcccgacccgtttttacccgcaaaagcccgctaatttaggtccgcactttgggcacaaaaatttagcccgaacttaaacctggcccgacccatgatcacctctagtttaatccaaactaaaaaactacacaagttagccaaaaattatgtctactttgtacaactttataaaatacacacagtagttgatatcttgatgattaactccttttgaagtttgactacacaccaaccccaaacacacccactttttcccccctcttgtcaccaaccccccctcctctttagccaccaaagtttggttggtgagtcctccataactgctaaattctctcttttttctctctcctaaaaaactaaaacccaccaaaatttcagacatcaaaaaaattacaagtgaaggaaacaataatggctcaagctagcaccataaacaatggtgtcaaaagcacccaattatgccccaatttacccaaaacccacttatccaaatcttcaaaatctgttaaatttggatcaaatttgagattttctccaaagttgaaatcttttaacaatgaaagagttggtgggaattcatcagttgttttcagggttagggcttcagttgcagcagcagctgaaaaatcatcaactgtaccagaaattgtgttacaacccatcaaagagatctcgggtaccattcaattgcccggatccaagtcattatctaatcggattctacttcttgctgccctttctcaggtacttttcaattgtttgatttctttttttcttagaacttgtgaatttgtatactttatccgtttctaaatacgtgcaacatttgaatagtaacgagtatttatctaccaacttatttaatattctctcacgaatgtatatgaaaaaatatagtcatgcgtggttttatttgattgatctgcggacttttataatatcaactttttataatttagaggacaaagtagtgtattgggtagcgtgtaaggaggttgggaaactggaggaattttttaacaattcaagtttgatatttttcatagtgaaatgtttattagcatagaatcatgcttttagtttttagtggagtgtgcatttattctttaacttgttggatggctatgattaagaattggattctggttatttgcttgagtatttagaaattaattgtgggtgttggtgataatgtaacaaaattgttttgaaggtgtgagaatgtgattttaattatatgaggaaatgatgggttatttattgtaatgtgggaatttatgataatatgttggaggatgaaacaattgatgattttgaagtggggtatgaaggctttcccccatttttttacctttcatgtgttgtatgtagcagactgccaaagcaattcttctgagcagcttggcatatttccattgcaactcataatctcaatccaagcacaatcaattacctgccacgctagcactttaagtagcaaaatcgcgcttgaagaaaagataataccacaggcttctatagttctattccttgtgatataggacacaagtatcatcctagatgacttccctagccctgcaaataattcctggaaggaagtccgttgagtatccttgatcaagtaaaattagcgctttcttttgggtaacacaaactatactcgaaccactttatgctaagggatcacattgcgtctcttgcagaacttttaacatttctaacatggcataagcacggaaacaccctgtgaagttgctagtgaccatcttttttgataaatcaagaatccctgttcttatttgcatacaaagggttaagtcttgtctgagagggattgacatatctcctgctggatagactttgtgttcatctctaatgttattctgagtttgcattgtatgtgttgtgttttcgtttttcttcttgtttgtgtgtgtgtgtgtgtgtgtgtgtgtgtgttacccaaacttgtacggaaatttccatcctaacgagaattatgctgcagggaacaacagtggttgacaacttgctatatagtgatgatatccgttacatgctggatgctttgagaactcttgggttgaatgtggaggatgataatatagccaaaagggcaatcgtggagggttgcggtggtttgtttcctgttggaaaagatgggaaagaaattgaactttttcttggaaatgcaggaacagcaatgcgctcattgacagctgcagttgctgttgctggaggaaattctaggtttgtctactaaggccttccatgtcatcgtgaggctgttaatattcttttattttgtgtggagacttgtttcctcttgctacaattgcaaagggggctgggattgattaacaatgcagaactcaaacactatctttggtatcaccgtctggcaggtggcatctgatcttgcaaaacagatatggagggttttgccggaaaggggttgggggtgggacttgggagtatagcctcaatgttatagaagattgtgctatactactgtaaaattaacttttggttggaaccagatatagttaataaagtatttttttatctggtgaggggtgcttctaggtcctgaaaagttccaccatagaaaaaaattgaatttcattgtgaaaagctaaggtgaattcattaaattcaatacatgttgttgattgcttgaactagaatacttcagatatcagttaattgaatttatttcttttggagaacatgcatgaagagcttttaactcgcctctactatcctgctcttaattatttttataaatagatttagcaattgggaatatcctgtaatttgctggttgctttttcatatggtatatattgaattggtgtggaggcgttttacaaagagtgaaggtaattgttgatgggtggatattgaatggaaatactttgatggcggatagcatattcatctgattggatgtctgaaatttgatgagctctagtaaatgttcctccatgtatgcttgtgtattgggaatttgcaatccagtagtagagaacacccctgataattgcactattattcctgagttgtgagagctctcaagaagatagatggggttcttcaagttttttaattgtctttaggtagtgtaaaggttgcaatatttcaaaggatctgtctgatccaacaagtctgctaaatccttcaccaatctgaaaggggagaagatactgctctctctgacctgcttgcatgcatataaagcttctaaaacaaataggttaaatgtaaaacaagcgcagaagttttcacttctcttgggaaatgtgtgccaagatctattgcatgacatgaattcatatttattgattatatgctcaacatgaatgggattaagaatgaaataaagtagcatgagtaggagacaatccgcctgctcttttaataggcatatacaatcagtcatcaacatcattgctgctttagaatttgatttatgttgatcttggtttttgcagctatgtacttgatggagtgccgagaatgagggagcgacccattggggatttggtagcgggtctaaagcaacttggcgccgatgttgactgttatcttggcacaaattgtcctcctgttcgagtgaatgctaaaggaggccttcccgggggcaaggtgaattctcttgttttgattagagaaaaattataagttagtgttctatcatgcttgacacgaacaagtttttttatctgaaagagaaagaagtgtatgcctaatgattaacagtcatattcaaaatgatataaaagagggtggaaggttacttgctctatgatgatttatggtagtaccgtgttaccaatagcagaattcaagcaatattctttgaactggtaataacaagttcaagcaatcaagcatagtttagattagattctatcaatctcttagcatagtttaaattcgcttccatcaatctcttttgtgacgtaagaagttctgttccattatacttatgctttttgtgaaattttatttgcaggtcaagctctctggatcagttagtagccaatatttgactgcactgcttatggctactcctttgggtcttggagacgtggaggttgaaatcattgataaattgatttctgtaccatatgtggagatgacaataaagctaatggaaaggtttggagtgtctgtagagcatagtgctgactggggtaggttcttgatccgaggtggtcagaagtacaagtaagtctctcttttttactacgtgtcctgaaaaatctatgttttagtagactaagatactataaaatacatcagatctcctggaaatgcgtatgttgagggtgatgcttcaagtgctagttacttcataggaggggccgcagtcactggtgggactgtgactgttgagggttgtggaacaagtagtttacaggtatgatttaaagccttatttcacatccttttacttctctccttactgcatctcagcttaattctgaagaactcttgttgctcaatctctaggcataagcttgttctttcgaccttctaaatttgcaaaatcattctgttaatgtaacaaacagaagatgagatggtgtttttgatcctgataaaaaaaattaggacattcatgattggtttatgttctatgacaatttcgatgatctcttcaattgtaacttgaggacccttttctgctagtaaagattgtgtataagctattctagactgttgtatacacctcatattccggtattgtttatacctaataaacttcttatgattagtatcttacttgtctcatgtgttttgcatagggtgatgtaaaatttgctgaagttcttgagaagatgggttgcaaggtatcctggacagagaacagtgtcactgtcactggaccacccagggatgcatctggaagaaaacacttgcgcgccgttgatgtcaacatgaacaaaatgccagatgttgcaatgactcttgctgttgttgctctttatgcagatggacccaccaccattagagacggtatgcttaattcctttctgtgaacatgacactcttcttgtgccataggtagattccgtagttattggtcacaatccaaatttgcattggtatttaaagcaagtcttaggtggtgagaccgcttgaaacccataatataaaagaaaggtcaccttggtctcaaagttaattcttgtgagaccatctcatgcaagattttgccgggtatctaatccttgtttgcactgaggaaaaggaaaaaaattaacatgacctattagtaagccaaaaaaattctaacaagagaagtagccgaataggtaataatttttgtgatataatgatcagtggctagctggagagtgaaggaaacagaacggatgattgcgatttgcacagagctcagaaaggttagccattttggatatacacattcttgaaggttttcaaccttgtagaagattgtactattgataaaaaaaattgatgtttatccggtgtacttcgaaatttcttttcagctgggggcaacagttgaggaaggatcagattactgtgtgatcactccacctgagaaactaaatgtgacggccattgatacatacgatgatcaccgaatggccatggcattctctcttgctgcctgcgccgatgttcctgttaccatcaaggacccgggttgcactcgcaagactttcccagactactttgatgtgttggaaaggtttgcaaagcattaagtggtctcctacatattctataaagcataagctgagattttttgagagaattaggagatgaaaaatgctttctgcttgagttatcatcacattctttgtattatgattgtaagattattatagtatagagtttacaaagtactactaataattgttatgtatccgattgatcagaaataagttaattggaaggctggactttgaaaatgtgaccaagacactagtgtgaccaagtcattttgttaatgtgagttcaatgttattgattcaacatgtagagccaaatctcaattctatcgtcacttcatatgaccaaaaatctaaagatgaaaaagtaaaaaagagcatgttggatcaaactctagctgtatctctgaaattcaatcacgcagttagatcaaatgaggattaaagggagt

SEQ ID NO: 10 - DNA, 1554 bp, Artificial Sequence
  cDNA of mutant BvEPSPS (P106S)
atggctcaagctagcaccataaacaatggtgtcaaaagcacccaattatgccccaatttacccaaaacccacttatccaaatcttcaaaatctgttaaatttggatcaaatttgagattttctccaaagttgaaatcttttaacaatgaaagagttggtgggaattcatcagttgttttcagggttagggcttcagttgcagcagcagctgaaaaatcatcaactgtaccagaaattgtgttacaacccatcaaagagatctcgggtaccattcaattgcccggatccaagtcattatctaatcggattctacttcttgctgccctttctcagggaacaacagtggttgacaacttgctatatagtgatgatatccgttacatgctggatgctttgagaactcttgggttgaatgtggaggatgataatatagccaaaagggcaatcgtggagggttgcggtggtttgtttcctgttggaaaagatgggaaagaaattgaactttttcttggaaatgcaggaacagcaatgcgctcattgacagctgcagttgctgttgctggaggaaattctagctatgtacttgatggagtgccgagaatgagggagcgacccattggggatttggtagcgggtctaaagcaacttggcgccgatgttgactgttatcttggcacaaattgtcctcctgttcgagtgaatgctaaaggaggccttcccgggggcaaggtcaagctctctggatcagttagtagccaatatttgactgcactgcttatggctactcctttgggtcttggagacgtggaggttgaaatcattgataaattgatttctgtaccatatgtggagatgacaataaagctaatggaaaggtttggagtgtctgtagagcatagtgctgactggggtaggttcttgatccgaggtggtcagaagtacaaatctcctggaaatgcgtatgttgagggtgatgcttcaagtgctagttacttcataggaggggccgcagtcactggtgggactgtgactgttgagggttgtggaacaagtagtttacagggtgatgtaaaatttgctgaagttcttgagaagatgggttgcaaggtatcctggacagagaacagtgtcactgtcactggaccacccagggatgcatctggaagaaaacacttgcgcgccgttgatgtcaacatgaacaaaatgccagatgttgcaatgactcttgctgttgttgctctttatgcagatggacccaccaccattagagacgtggctagctggagagtgaaggaaacagaacggatgattgcgatttgcacagagctcagaaagctgggggcaacagttgaggaaggatcagattactgtgtgatcactccacctgagaaactaaatgtgacggccattgatacatacgatgatcaccgaatggccatggcattctctcttgctgcctgcgccgatgttcctgttaccatcaaggacccgggttgcactcgcaagactttcccagactactttgatgtgttggaaaggtttgcaaagcattaa

SEQ ID NO: 11 - DNA, 243 bp, Artificial Sequence
  exon 2 of mutant BvEPSPS (P106S)
cagggaacaacagtggttgacaacttgctatatagtgatgatatccgttacatgctggatgctttgagaactcttgggttgaatgtggaggatgataatatagccaaaagggcaatcgtggagggttgcggtggtttgtttcctgttggaaaagatgggaaagaaattgaactttttcttggaaatgcaggaacagcaatgcgctcattgacagctgcagttgctgttgctggaggaaattct

SEQ ID NO: 12 - protein, 517 aa, Artificial Sequence
  mutant EPSPS protein (P106S)
MAQASTINNGVKSTQLCPNLPKTHLSKSSKSVKFGSNLRFSPKLKSFNNERVGGNSSVVFRVRASVAAAAEKSSTVPEIVLQPIKEISGTIQLPGSKSLSNRILLLAALSQGTTVVDNLLYSDDIRYMLDALRTLGLNVEDDNIAKRAIVEGCGGLFPVGKDGKEIELFLGNAGTAMRSLTAAVAVAGGNSSYVLDGVPRMRERPIGDLVAGLKQLGADVDCYLGTNCPPVRVNAKGGLPGGKVKLSGSVSSQYLTALLMATPLGLGDVEVEIIDKLISVPYVEMTIKLMERFGVSVEHSADWGRFLIRGGQKYKSPGNAYVEGDASSASYFIGGAAVTGGTVTVEGCGTSSLQGDVKFAEVLEKMGCKVSWTENSVTVTGPPRDASGRKHLRAVDVNMNKMPDVAMTLAVVALYADGPTTIRDVASWRVKETERMIAICTELRKLGATVEEGSDYCVITPPEKLNVTAIDTYDDHRMAMAFSLAACADVPVTIKDPGCTRKTFPDYFDVLERFAKH

SEQ ID NO: 13 - DNA, 7001 bp, Artificial Sequence
  genomic DNA of mutant BvEPSPS (T102I and P106S)
aggaagtatttgaatttgatatagatattgtgtctttgtgtgtgttgaatttcaattcccagttccctaaaaaaaatttacaattgcaatttcgagattatgatgtaaattaaatttgagagactagaaagtatttggtcaacccaaaaaaaaaatatcaatacttatataaatcaaaaacataatagagaatccaattttactaaaaatattagtaattttgattaaaataatctattaaaatgaactctaaccttcacataatttccacatattattaatcaacaaaataagcatcacaaattattagaataggcgatctaattttaacataaaattagacgaattcaaattgaatttttctaacaagctcattccatttcacgcaacccaaaattatcctagtcagtagtcatccattcttttctcattcctttattcttgattatcgaactacaacagataatttcaaaaaaaaactaaattggtagtcttaactgattaaactacttactaaatggattaaagaatgtcattactgaatagattaaactgattacgaaatagattaacttggtccctaaatagattaaattagttactatattaaaattaggcgatctcttacaaaaccaactgaataagcatagctctgtatattacctagatttcaactaaatcaaaaccccttacagttcaatctagagctgatcattttggctcggcccgtcccatttttgggccgggttttagtcagatttttttggcccgcggtcgggcccggcccgatttttttggctttgggcaagccaaaaacgacttttcagtttattttttggcccgacccgtttttacccgcaaaagcccgctaatttaggtccgcactttgggcacaaaaatttagcccgaacttaaacctggcccgacccatgatcacctctagtttaatccaaactaaaaaactacacaagttagccaaaaattatgtctactttgtacaactttataaaatacacacagtagttgatatcttgatgattaactccttttgaagtttgactacacaccaaccccaaacacacccactttttcccccctcttgtcaccaaccccccctcctctttagccaccaaagtttggttggtgagtcctccataactgctaaattctctcttttttctctctcctaaaaaactaaaacccaccaaaatttcagacatcaaaaaaattacaagtgaaggaaacaataatggctcaagctagcaccataaacaatggtgtcaaaagcacccaattatgccccaatttacccaaaacccacttatccaaatcttcaaaatctgttaaatttggatcaaatttgagattttctccaaagttgaaatcttttaacaatgaaagagttggtgggaattcatcagttgttttcagggttagggcttcagttgcagcagcagctgaaaaatcatcaactgtaccagaaattgtgttacaacccatcaaagagatctcgggtaccattcaattgcccggatccaagtcattatctaatcggattctacttcttgctgccctttctcaggtacttttcaattgtttgatttctttttttcttagaacttgtgaatttgtatactttatccgtttctaaatacgtgcaacatttgaatagtaacgagtatttatctaccaacttatttaatattctctcacgaatgtatatgaaaaaatatagtcatgcgtggttttatttgattgatctgcggacttttataatatcaactttttataatttagaggacaaagtagtgtattgggtagcgtgtaaggaggttgggaaactggaggaattttttaacaattcaagtttgatatttttcatagtgaaatgtttattagcatagaatcatgcttttagtttttagtggagtgtgcatttattctttaacttgttggatggctatgattaagaattggattctggttatttgcttgagtatttagaaattaattgtgggtgttggtgataatgtaacaaaattgttttgaaggtgtgagaatgtgattttaattatatgaggaaatgatgggttatttattgtaatgtgggaatttatgataatatgttggaggatgaaacaattgatgattttgaagtggggtatgaaggctttcccccatttttttacctttcatgtgttgtatgtagcagactgccaaagcaattcttctgagcagcttggcatatttccattgcaactcataatctcaatccaagcacaatcaattacctgccacgctagcactttaagtagcaaaatcgcgcttgaagaaaagataataccacaggcttctatagttctattccttgtgatataggacacaagtatcatcctagatgacttccctagccctgcaaataattcctggaaggaagtccgttgagtatccttgatcaagtaaaattagcgctttcttttgggtaacacaaactatactcgaaccactttatgctaagggatcacattgcgtctcttgcagaacttttaacatttctaacatggcataagcacggaaacaccctgtgaagttgctagtgaccatcttttttgataaatcaagaatccctgttcttatttgcatacaaagggttaagtcttgtctgagagggattgacatatctcctgctggatagactttgtgttcatctctaatgttattctgagtttgcattgtatgtgttgtgttttcgtttttcttcttgtttgtgtgtgtgtgtgtgtgtgtgtgtgtgtgttacccaaacttgtacggaaatttccatcctaacgagaattatgctgcagggaacaacagtggttgacaacttgctatatagtgatgatatccgttacatgctggatgctttgagaactcttgggttgaatgtggaggatgataatatagccaaaagggcaatcgtggagggttgcggtggtttgtttcctgttggaaaagatgggaaagaaattgaactttttcttggaaatgcaggaatagcaatgcgctcattgacagctgcagttgctgttgctggaggaaattctaggtttgtctactaaggccttccatgtcatcgtgaggctgttaatattcttttattttgtgtggagacttgtttcctcttgctacaattgcaaagggggctgggattgattaacaatgcagaactcaaacactatctttggtatcaccgtctggcaggtggcatctgatcttgcaaaacagatatggagggttttgccggaaaggggttgggggtgggacttgggagtatagcctcaatgttatagaagattgtgctatactactgtaaaattaacttttggttggaaccagatatagttaataaagtatttttttatctggtgaggggtgcttctaggtcctgaaaagttccaccatagaaaaaaattgaatttcattgtgaaaagctaaggtgaattcattaaattcaatacatgttgttgattgcttgaactagaatacttcagatatcagttaattgaatttatttcttttggagaacatgcatgaagagcttttaactcgcctctactatcctgctcttaattatttttataaatagatttagcaattgggaatatcctgtaatttgctggttgctttttcatatggtatatattgaattggtgtggaggcgttttacaaagagtgaaggtaattgttgatgggtggatattgaatggaaatactttgatggcggatagcatattcatctgattggatgtctgaaatttgatgagctctagtaaatgttcctccatgtatgcttgtgtattgggaatttgcaatccagtagtagagaacacccctgataattgcactattattcctgagttgtgagagctctcaagaagatagatggggttcttcaagttttttaattgtctttaggtagtgtaaaggttgcaatatttcaaaggatctgtctgatccaacaagtctgctaaatccttcaccaatctgaaaggggagaagatactgctctctctgacctgcttgcatgcatataaagcttctaaaacaaataggttaaatgtaaaacaagcgcagaagttttcacttctcttgggaaatgtgtgccaagatctattgcatgacatgaattcatatttattgattatatgctcaacatgaatgggattaagaatgaaataaagtagcatgagtaggagacaatccgcctgctcttttaataggcatatacaatcagtcatcaacatcattgctgctttagaatttgatttatgttgatcttggtttttgcagctatgtacttgatggagtgccgagaatgagggagcgacccattggggatttggtagcgggtctaaagcaacttggcgccgatgttgactgttatcttggcacaaattgtcctcctgttcgagtgaatgctaaaggaggccttcccgggggcaaggtgaattctcttgttttgattagagaaaaattataagttagtgttctatcatgcttgacacgaacaagtttttttatctgaaagagaaagaagtgtatgcctaatgattaacagtcatattcaaaatgatataaaagagggtggaaggttacttgctctatgatgatttatggtagtaccgtgttaccaatagcagaattcaagcaatattctttgaactggtaataacaagttcaagcaatcaagcatagtttagattagattctatcaatctcttagcatagtttaaattcgcttccatcaatctcttttgtgacgtaagaagttctgttccattatacttatgctttttgtgaaattttatttgcaggtcaagctctctggatcagttagtagccaatatttgactgcactgcttatggctactcctttgggtcttggagacgtggaggttgaaatcattgataaattgatttctgtaccatatgtggagatgacaataaagctaatggaaaggtttggagtgtctgtagagcatagtgctgactggggtaggttcttgatccgaggtggtcagaagtacaagtaagtctctcttttttactacgtgtcctgaaaaatctatgttttagtagactaagatactataaaatacatcagatctcctggaaatgcgtatgttgagggtgatgcttcaagtgctagttacttcataggaggggccgcagtcactggtgggactgtgactgttgagggttgtggaacaagtagtttacaggtatgatttaaagccttatttcacatccttttacttctctccttactgcatctcagcttaattctgaagaactcttgttgctcaatctctaggcataagcttgttctttcgaccttctaaatttgcaaaatcattctgttaatgtaacaaacagaagatgagatggtgtttttgatcctgataaaaaaaattaggacattcatgattggtttatgttctatgacaatttcgatgatctcttcaattgtaacttgaggacccttttctgctagtaaagattgtgtataagctattctagactgttgtatacacctcatattccggtattgtttatacctaataaacttcttatgattagtatcttacttgtctcatgtgttttgcatagggtgatgtaaaatttgctgaagttcttgagaagatgggttgcaaggtatcctggacagagaacagtgtcactgtcactggaccacccagggatgcatctggaagaaaacacttgcgcgccgttgatgtcaacatgaacaaaatgccagatgttgcaatgactcttgctgttgttgctctttatgcagatggacccaccaccattagagacggtatgcttaattcctttctgtgaacatgacactcttcttgtgccataggtagattccgtagttattggtcacaatccaaatttgcattggtatttaaagcaagtcttaggtggtgagaccgcttgaaacccataatataaaagaaaggtcaccttggtctcaaagttaattcttgtgagaccatctcatgcaagattttgccgggtatctaatccttgtttgcactgaggaaaaggaaaaaaattaacatgacctattagtaagccaaaaaaattctaacaagagaagtagccgaataggtaataatttttgtgatataatgatcagtggctagctggagagtgaaggaaacagaacggatgattgcgatttgcacagagctcagaaaggttagccattttggatatacacattcttgaaggttttcaaccttgtagaagattgtactattgataaaaaaaattgatgtttatccggtgtacttcgaaatttcttttcagctgggggcaacagttgaggaaggatcagattactgtgtgatcactccacctgagaaactaaatgtgacggccattgatacatacgatgatcaccgaatggccatggcattctctcttgctgcctgcgccgatgttcctgttaccatcaaggacccgggttgcactcgcaagactttcccagactactttgatgtgttggaaaggtttgcaaagcattaagtggtctcctacatattctataaagcataagctgagattttttgagagaattaggagatgaaaaatgctttctgcttgagttatcatcacattctttgtattatgattgtaagattattatagtatagagtttacaaagtactactaataattgttatgtatccgattgatcagaaataagttaattggaaggctggactttgaaaatgtgaccaagacactagtgtgaccaagtcattttgttaatgtgagttcaatgttattgattcaacatgtagagccaaatctcaattctatcgtcacttcatatgaccaaaaatctaaagatgaaaaagtaaaaaagagcatgttggatcaaactctagctgtatctctgaaattcaatcacgcagttagatcaaatgaggattaaagggagt

SEQ ID NO: 14 - DNA, 1554 bp, Artificial Sequence
  cDNA of mutant BvEPSPS (T102I and P106S)
atggctcaagctagcaccataaacaatggtgtcaaaagcacccaattatgccccaatttacccaaaacccacttatccaaatcttcaaaatctgttaaatttggatcaaatttgagattttctccaaagttgaaatcttttaacaatgaaagagttggtgggaattcatcagttgttttcagggttagggcttcagttgcagcagcagctgaaaaatcatcaactgtaccagaaattgtgttacaacccatcaaagagatctcgggtaccattcaattgcccggatccaagtcattatctaatcggattctacttcttgctgccctttctcagggaacaacagtggttgacaacttgctatatagtgatgatatccgttacatgctggatgctttgagaactcttgggttgaatgtggaggatgataatatagccaaaagggcaatcgtggagggttgcggtggtttgtttcctgttggaaaagatgggaaagaaattgaactttttcttggaaatgcaggaatagcaatgcgctcattgacagctgcagttgctgttgctggaggaaattctagctatgtacttgatggagtgccgagaatgagggagcgacccattggggatttggtagcgggtctaaagcaacttggcgccgatgttgactgttatcttggcacaaattgtcctcctgttcgagtgaatgctaaaggaggccttcccgggggcaaggtcaagctctctggatcagttagtagccaatatttgactgcactgcttatggctactcctttgggtcttggagacgtggaggttgaaatcattgataaattgatttctgtaccatatgtggagatgacaataaagctaatggaaaggtttggagtgtctgtagagcatagtgctgactggggtaggttcttgatccgaggtggtcagaagtacaaatctcctggaaatgcgtatgttgagggtgatgcttcaagtgctagttacttcataggaggggccgcagtcactggtgggactgtgactgttgagggttgtggaacaagtagtttacagggtgatgtaaaatttgctgaagttcttgagaagatgggttgcaaggtatcctggacagagaacagtgtcactgtcactggaccacccagggatgcatctggaagaaaacacttgcgcgccgttgatgtcaacatgaacaaaatgccagatgttgcaatgactcttgctgttgttgctctttatgcagatggacccaccaccattagagacgtggctagctggagagtgaaggaaacagaacggatgattgcgatttgcacagagctcagaaagctgggggcaacagttgaggaaggatcagattactgtgtgatcactccacctgagaaactaaatgtgacggccattgatacatacgatgatcaccgaatggccatggcattctctcttgctgcctgcgccgatgttcctgttaccatcaaggacccgggttgcactcgcaagactttcccagactactttgatgtgttggaaaggtttgcaaagcattaa

SEQ ID NO: 15 - DNA, 243 bp, Artificial Sequence
  exon 2 of mutant BvEPSPS (T102I and P106S)
cagggaacaacagtggttgacaacttgctatatagtgatgatatccgttacatgctggatgctttgagaactcttgggttgaatgtggaggatgataatatagccaaaagggcaatcgtggagggttgcggtggtttgtttcctgttggaaaagatgggaaagaaattgaactttttcttggaaatgcaggaatagcaatgcgctcattgacagctgcagttgctgttgctggaggaaattct

SEQ ID NO: 16 - protein, 517 aa, Artificial Sequence
  mutant EPSPS protein (T102I and P106S)
MAQASTINNGVKSTQLCPNLPKTHLSKSSKSVKFGSNLRFSPKLKSFNNERVGGNSSVVFRVRASVAAAAEKSSTVPEIVLQPIKEISGTIQLPGSKSLSNRILLLAALSQGTTVVDNLLYSDDIRYMLDALRTLGLNVEDDNIAKRAIVEGCGGLFPVGKDGKEIELFLGNAGIAMRSLTAAVAVAGGNSSYVLDGVPRMRERPIGDLVAGLKQLGADVDCYLGTNCPPVRVNAKGGLPGGKVKLSGSVSSQYLTALLMATPLGLGDVEVEIIDKLISVPYVEMTIKLMERFGVSVEHSADWGRFLIRGGQKYKSPGNAYVEGDASSASYFIGGAAVTGGTVTVEGCGTSSLQGDVKFAEVLEKMGCKVSWTENSVTVTGPPRDASGRKHLRAVDVNMNKMPDVAMTLAVVALYADGPTTIRDVASWRVKETERMIAICTELRKLGATVEEGSDYCVITPPEKLNVTAIDTYDDHRMAMAFSLAACADVPVTIKDPGCTRKTFPDYFDVLERFAKH

SEQ ID NO: 17 - DNA, 61 bp, Artificial Sequence
  marker BvEPSPS T102I
aaattgaactttttcttggaaatgcaggaayagcaatgcgcccattgacagctgcagttgc

SEQ ID NO: 18 - DNA, 61 bp, Artificial Sequence
  marker BvEPSPS P106S
tttcttggaaatgcaggaacagcaatgcgcycattgacagctgcagttgctgttgctggag

SEQ ID NO: 19 - DNA, 78 bp, Artificial Sequence
  synthetic oligo simulating SNP leading to P106S mutation of BvEPSPS
gaaaagatgggaaagaaattgaactttttcttggaaatgcaggaacagcaatgcgctcattgacagctgcagttgctg

SEQ ID NO: 20 - DNA, 78 bp, Artificial Sequence
  synthetic oligo simulating SNP leading to T102I mutation of BvEPSPS
gtttcctgttggaaaagatgggaaagaaattgaactttttcttggaaatgcaggaatagcaatgcgcccattgacagc

SEQ ID NO: 21 - DNA, 72885 bp, Zea mays
  misc_feature (5583)..(5733): n is a, c, g, or t
  misc_feature (31155)..(31650): n is a, c, g, or t
  misc_feature (44470)..(44479): n is a, c, g, or t
  misc_feature (45143)..(45152): n is a, c, g, or t
  misc_feature (46993)..(47109): n is a, c, g, or t
  misc_feature (53299)..(53398): n is a, c, g, or t
  misc_feature (71287)..(71733): n is a, c, g, or t
gcccagcaattcaaaagaaaccgaacacccttccggaaattccctctggcaatggcgtcgggctcgtctcgcccccaaatcgaccaggtaaaaccctaacctagttcctcgcctattcacttcgtcgcctccaagcgctaattcttcctgcgttccggctccatctcagttcttcccggccaagaagcggaggccctcgtcgcggaagggcgagtcgccgcgacccgggacgcagcatgagagccccggcggcgccaaggggtccctggaagggtacctcgtccgttcgccttgcaaccgtgccgtggcagcggcatcggtggtccccgtgggctcgcccaggggcggggacccgggcgccaggcgtagcctctcggccgcaatggatgtcgacgtcggttcctcggcttcggtggctgcggcggcaggtgacggggcagactttgatctcaggaggagcacggcggatttcttgtcccattcctgcaggtgagcgcgcacagtgtgaaacataaggggagttatagtattggttccaataactgttattttgcaagttacgggtctaattttgttgttccagtgctatcctgcctttgaggggtgactgtgattacagcgagcagtgccagatgaagcagaagcggagtgcgtcccagtcattcttggttccttgtgacaacgactatgtcaagaagcagcgagttgcccattgtggtggctttgaagctctaaaggttggatcaagatacactatccatccatctttagcatcgtcatatgataagtgatttcatgagtttcaactcttagtttggttctttgcaggagttagatgataatgtagcttccatgaagcaatgcatcaatcaccatggtggctcagaggctgtggaggtttagttatgcctgaacaagtcaaacctggaaccgtttctttgttttcctcttttccttttgaacttctcattatttccttttcatcaggaatctgttgagggggaacatgtgagttgtgttgggttttcggccttgcaaagatgtagctttaccccaagtactgcacagataaaagttgggttttctctagcacctgtggaaaccctaaagtctgtatcgaggaattcccttacttcacctggtgaggagttctggaatgcagcaattgaactcgctgatgggatatctgcccaggctgataaggtccgtggaaggccagaatttgatgcagcagaagacaagtcatcttgtgcagtagcagcattctttaagactcttcctagatcaggaagggatgagcttgactgtcaaaacacagtaggcagcaatgatacacatcatatagagaaattgtcaaataaagttgaatcactggcagtaaactgtcagcatataattagctcacctttgcctgtgaagcagctagatttctttcatgaggatgatattaaagtttcaggttcaaaatttgaaacaaaaggcagctatgaaacttgtaatgcacaagcagaccgtgttccactgaaaggcagtggccgcctagaaaaggaaaatctcatggaccctgtggatgtgatgaagagaagtgctattaatttgcacactgattctgcagccatgagatgtcagggtgttttcaagtcaacaactgaagggaaggttcatccaactcaagaggctggaagagattctaatcttattaggagagatctcaatcagccaacccacaatgaaaataaatcacttgctgcatattcaaataatcgcaagacttggatagattccaagagtaaagttgcttctcaggaagtggaagctagcacacctactagctccattcctctaaaggatcactcaaagatatcaagttggcttcctcctgacctttgtgctatatacatgaaaaaaggcatttcagagctgtacccttggcaggttaaggttcttttctctaattatctatttaatgaatctctggcagctagccttctttcgtctggccatttttgcctatgtatttttttctccagccatgcaaactaccactgccctctctactagtaggattaccaattatttttgctcgtaagctaagcttctttagtatttgtatcgtaataagtatgtcttgaaaactagtacttagtatatcaagtgctgagatggtttgtacatgtccaatagagaccttttagaggcaccagtgcatattagtattataaaacattaaaacgtgatagtaatgggaagaggtagggaaaggccaaacttgatatggaaagatgcaataaaaggagacttaaaatgatgaaatatatctaaagatttagtcttcaatatgattatgagtgcatggaaaacaactattcacgtgcctaaccttgatttgtggcttgtgttgggtttcaactctagtctacactcacttgcttggtactaaaaggctttgttgttattgttgattcatataaaatgctaagtcttctcttgtattgctgtcatcacattcttttcacgtttttaatgcgtttttgcttcatttttctcgaatattgtaatgctctcctagatctgtctgaaggcatgtttggtttgtgcccccactatgctaaaccaaatttggcaatagaagaaaccatgacatggccttttgtaacaccccgtccaatccctggaccggcggtacttactcctggtagctctctagaatcatatattgtccccacagaccaacacaagtcttttatgcgcactttgtcctcactcatgcgcacccgagaaaacttcccagtcggtcacccatcccaaattgctccaagccaagcacgcttaacttggaggttcttttgagataggcttcctaaaaagaagatgcaccttgttgatatggttactctattaattctattaagccttgggccaggatatcccatcccaggggccaggatatcacaattcaccccccttagaagaccgatgtcctcgtcggtcaaccccaatccaggaacctcccctcttagccacgtctgtgtgtctagtgtcgtcatatgccatgccatgtgaccactctgggcccacatgcgccatgcgccatatacccaaaccacctagcccacacacgcccgtgaaacatcgagggtcggctctgataccacttgtaacaccccgtccaatccttagaccggcggtacttactcctggtagctctctagaatcatatattgtccccacagaccaacacaagtcttttatgcgcactttgtcctcactcatgcgcacccgagaaaacttcccagtcggtcacccatcccaaattgctccaagccaaacacgcttaacttggaggttctttcgagatagacttcctaaaaagaagatacaccttgttgatatggttactctattaattctattaagccttgggccaggatatcccatcccaggggccaggatatcacacctttaggcaggtacaagatttgaattggattattggagccaaataaatttacataaatatctacctaactaaaaggaacaatgtttcttgttgccccttccacccaatgataggtggacccaaggtaatcctgcgtctcttatgtcaggtcagcactctctcgctaagagccatttgttcatgattgaatagccaagtgagatggccaccatcctcgaggtcatgttttcggacctaggatgtcaggccgaatgtgttctggttcttggagttgtattttgtttcttttaatataagccgttcggttgcataggccaaaagagcagtttgaggccaaatgaaattttagcggcgagagctgtctcactgagttgtgagtttgaagcagtctttccgcatttgcgcggggggggggtgatggaataagtcttgagcatctagaggacagcctgcttttgactgtcctctgtagtcctttagcatctagaggacaacagtcgctttttgactgtcctctgtagtctctttagcatctagaggacaacaatcgcttttgactgtcctctgtagtcgctttagcatctagaggacagcagtcgctttttgactgtcctctgtagtctctttagcatctagaggacaatcctgttgtgtagtgtgtgtgagaaggtgtggtagtgcagcccctagggctataaatatgtgtccccaacctctctaagggtatgacattgtgtagtgtttgaggaaataaacagaaaattgccccaactcatagtgtcatcctcttgatgagagttagagtccctctacttacaattggtatcagagccaaactatcctgcagcctaaacatatcgtgctcatctccttctcgcgtctctccccacactcagtcggcagcaagagctccaactgttccttcctcccctgctcagacgagcagcctttcgtctgagacagcctcttccacacgcagcaacccctcactagcccaccatgtccctacgctcggccacttcgagtgcgcggcgccagcaggaggccgaggtcgccgcggcacaagaacgcgagcgagcagcagcagcggctgcagcgacagcggcgagggcagcacggttggcggcggcggaactggcagcggcgagagcggaagtagaagcagcggaggcggcggatgctgcacgtgcggcggcaacagagctcgaggttctgcgcggcagtagagctggcagctctgcttctgtcgacgacaacaccgacgaagagctcaggctggcgagggaagcagcgcgagagcaggcggcatagtgggcagccgcgcatccccatgggggcgcgcgtggcggcagcccggatacgcgctgacggcgctctaggcggaggcgcacgcggcggcagcccagacgggcgtagacgcgccggcggtgctcccggcggcggcgaccgagtcgacggagatcgcggcctctacaggcggcgcggttctccctccccggatcggtaccatggtcgccgcatggcccaggccattgtcagggacatcggtcccggcggtggggggcctaccctcaccaagaccaactacgtcgagtgggccgcggtgatgagggtacggctccaggttcgccacatgtgggaagcagttcgttacgacgacgtcgactaccacgaggatcggcgggcgctggatgctctcattgctgtagtcccgcccgagatgcagttttcgctttcccagaagcggactgccaaggaggcctgggacgccatcgctgcgacccgcatcggcagcgatcgtgcccgcaagaccacactgcaggcacttcgcaaggagtgggagaacctggccttcaagccaggtgaggatgttgatgactttgctctccgcctcaacactctgttgcagaagatggtgcagttcggcgacgacacctacgatgaggagagagctgttgagaagctcttccgttgcatccccgagaagtacaggcagattgctcgctcgatcgagtctctgctagacctctccacgatgacgatcgaagaggcgattggtcgcctcaaggtggtggatggcgacgaaccacaggctctctctgggcctatcactatcggcgggnnnnnnnnnnnnnnnnnnnnnnnnnnnnnnnnnnnnnnnnnnnnnnnnnnnnnnnnnnnnnnnnnnnnnnnnnnnnnnnnnnnnnnnnnnnnnnnnnnnnnnnnnnnnnnnnnnnnnnnnnnnnnnnnnnnnnnnnnnnnnnnnnnnnnnncagggtgacaagaagaagggggagtcctcctcctcgacacgaggccgcaaacgcggcaagccgcgcaagccgcgtggaggcgcccaggccggggcgcgaggacatgctgagggtggtgcacgtggaggtgcccaaggcggcgccgtcggcaacaagaagccggcacgcgacgacggctgccacaactgcggcaagcttggccactgggccagggattgtcggcagccacgacgtggccaggccaacgtcgcacaagcagaggcggaggaggaggccctgctcctggcacatgcaagcatcgagccatctccagcggcaccggccgcagcggcactcctccaccttgatgagtcgaaagcacgcgctttcctcggcgacggctccaacaaggacatgatcgaaggatggtgcctcgacaccggcgccactcatcacatgaccggccgacgggagttcttcaccgagcttgactctagcgtccgaggctccgtcaagtttggggacgcctccggtgtagagatcaagggcgccggctcagtcgtcttcaccgccacgtctggtgagcacaggctgctcaccggagtctactacatccccgcgttgagaaactctatcatcagtttgggacagctggatgagaacggttcgcgcgtggaggtcgagcacggagtcatgaggatctgggatccctctcgtcgccttcttgccaaggtacgcaggagtgcaaatcggctttacatcctcaatgtgaaggtggcacaaccttgctgccttgctgctcgtcgagacgacggggcatggcagtggcacgagcgcttcgggcaccttaacttcgaagccttgaagcggctcagcgccaaggagatggtacgaggcctgccgtgccttgaccatgtggagcaattctgcgatgtctgcgtgttgacaaagtagagactgctccccttcccccagcagtcgagcttccgagccaaggagaggctcgagctcgtgcatggggacttgtgtggcccggtgacaccagccacaccaggaggacgacgctacttcttgctgctcgtcgacgatctctcccgctacatgtgggtgatgatccttggcagaaagggagaggctgcgaacgccatcaggcgtgtgcaggtcgctgcggaggcggagtgcggccgcaagctgtgatggaataagtcttgagcatctagaggacagcctgcttttgactgtcctctgtagtcctttagcatctagaggacagcttgactgtcctctgtagtctctttagcatctagaggacagcagtcgctttttgactgtcctctgtagtcgctttagcatctagaggacagcagtcgcttttgactgtcctctgtagtctctttagcatctagaggacaatcctgttgtatagtgtgtgtgagaaggtgtggtagtgcagcccctagggctataaatatgtgtccccaacccctctaagggtatggcattgtgtagtgtttgaggaaataaacagaaaattgccccaactcatagtgtcatcctcttgatgagagttagagtccctctacttacaattggtatcagagccaaactatcctgcagcctaaacatctcgtgttcatctccttcccgcgcctctccccacactcagtcggcagcaagagctccaactgttcctccctcccctgctcagacgagcagcctttcgtctgagacagcctcttccacacgcagcgacccctcactagcccgccatgtccctacgctcggccacttcgagtgcgcggcgccagcaggaggccgaggtcgccgcggcacaagaacgcgagcgagcagcagcagcggctgcagcgacagcgacgagggcagcacggttggcggcggcggaactggcagcggcgagagcggaagtagaagcagcggaggcggcggatgctgcacgtgcggcggcaacagagctcgaggttctgcgcggcagtagagctggcagctctgcttctgtcgacgacaacaccgacgacgagctcaggctggcgagggaagcagcgcgagagcaggcggcacagtgggcagccgcgcatccccatgggggcgcgcgtggcggcagcccggataggcgccgacacgctgacggcgctccaggcgggggcgcacgcggcggcagcccagacgggcgtagacgcgccgacggtgctcccggcggcggcgaccgagtcgacggagatcgcggcctctacaggcggcgcggttctccctccccggatcggtaccatggtcgtcgcatggcccaagccattgtcagggacatcggtcccgacggtgggtggcctaccctcaccaagaccaactacgtcgagtgggccgcggtgatgagggtacggctccaggttcgccacatgtgggaagcagttcgttacgacgacgtcgactaccacgaggatcggcgggcgctggatgctctcattgctgcagtcccgcccgagatgcagttttcgctttcccagaagcggactgccaaggaggcctgggacgccatcgctgcgacccgcatcggcagcgatcgtgcccgcaagaccacactgcaggcacttcgcaaggagtgggagaacctggctttcatgccaggtgaggatgttgatgactttgctctccgcctcaacactctgttgcagaagatggtgcagttcggcgacgacacctacgatgaggagagagctgttgagaagctcttccgttgcatccccgagaagtacaggcagattgctcgctcgatcgagtctctgctagacctctccacgatgacgatcgaagaggcgattggtcgcctcaaggtggtcgacggcgacgaaccacaggctctctctgggcctatcactatcggcgggaagctacatctcactcgggagcagtgggaggcctgccagggtgacaagaaggagtcctcctcgacacgaggccgcaaacgcggcaagccgcgcaaggcgcgtggaggcgcccaggccggggcgcgaggacatgctgagggtggtgcacgtggaggtgcccaaggcggcgccgtcggcaacaagaagccgacacgagacgacggctgccacaactgcggcaagcttggccactgggccagggattgtcggcagccacgacgtggccaggccaacgacgcacaggcggaggcggaggaggaggccctgctcctggcacatgcaagcatcgagccatctccagcggcaccggccgcagcggcactcctccaccttgatgagtcgaaagcacgcgctttcctcggcgacggctccaacaaggacatgatcgaaggatggtgcctcgacaccggcgccactcatcacatgaccggccgacgggagttcttcaccgagcttgactctagcgtccgaggctccgtcaagtttggggacgcctccggtgtagagatcaagggcgccggctcagtcgtcttcaccgccacgtctggtgagcacaggctgctcaccggagtctactacatccccgcgttgagaaactctatcatcagtttgggacagctggatgagaacggttcgcgcgtggaggtcgagcacggagtcatgaggatctgggatccctctcgtcgccttcttgccaaggtacgcaggagtgcaaatcggctttacatcctcaatgtgaaggtggcacaaccttgctgccttgctgctcgtcgagacgacggggcatggcagtggcacgagcgcttcgggcaccttaacttcgaagccttgaagcggctcagcgccaaggagatggtacgaggcctgccgtgccttgaccatgtggagcaattctgcgatgtctgcgtgttgacaaagtagagactgctccccttcccccagcagtcgagcttccgagccaaggagaggctcgagctcgtgcatggggacttgtgtggcccggtgacaccagccacaccaggaggacgacgctacttcttgctgctcgtcgacgatctctcccgctacatgtgggtgatgatccttggcagaaagggagaggctgcgaacgccatcaggcgtgtgcaggtcgctgcggaggcggagtgcggccgcaagctgtgatggaataagtcttgagcatctagaggacagcctgcttttgactgtcctctgtagtcctttagcatctagaggacagcttgactgtcctctgtagtctctttagcatctagaggacagcagtcgctttttgactgtcctctgtagtcgctttagcatctagaggacagcagtcgcttttgactgtcctctgtagtctctttagcatctagaggacaatcctgttgtatagtgtgtgtgagaaggtgtggtagtgcagcccctagggctataaatatgtgtccccaacccctctaagggtatggcattgtgtagtgtttgaggaaataaacagaaaattgccccaactcatagtgtcatcctcttgatgagagttagagtccctctacttacaattggtatcagagccaaactatcctgcagcctaaacatctcgtgttcatctccttcccgcgcctctccccacactcagtcggcagcaagagctccaactgttcctccctcccctgctcagacgagcagcctttcgtctgagacagcctcttccacacgcagcgacccctcactagcccgccatgtccctacgctcggccacttcgagtgcgcggcgccagcaggaggccgaggtcgccgcggcacaagaacgcgagcgagcagcagcagcggctgcagcgacagcgacgagggcagcacggttggcggcggcggaactggcagcggcgagagcggaagtagaagcagcggaggcggcggatgctgcacgtgcggcggcaacagagcttgaggttctgcgcggcagtagagctggcagctctgcttctgtcgacgacaacaccgacgaagagctcaggctggcgagggaagcagcgcgagagcaggcggcacagtgggcagtcgcgcatccccatgggggcgcgcgtggcggcagcccggataggcgtcgacacgctgacggcgctccaggcgggggcgcacgcggcggcagcccagacgggcgtagacgcgccggcggtgctcccggcggcggcgaccgagttgacggagatcgcggcctctacaggcggcgcggttctccctccccggatcggtaccatggtcgtcgcatggcccaagccattgtcagggacatcggtcccggcggtgggtggcctaccctcaccaagaccaactacgtcgagtgggccgtggtgatgagggtacggctccaggttcgccacatgtgggaagcagttcgttacgacgacgtcgactaccacgaggatcggcgggcgctggatgcccccattgctgcagtcccgcccgagatgcagttttcgctttcccagaagcggactgccaaggaggcctgggacgccatcgctgcgacccgcatcggcagcgatcgtgcccgcaagaccacactgcaggcacttcgcaaggagtgggagaacatgaccttcaagccaggtgaggatgttgatgactttgctctccgcctcaacactctgttgcagaagatggtgcagttcggcgacgacacctacgatgaggagagagctgttgagaagctcttccgttgcatccccgagaagtacaggcagattgctcgctcgatcgagtctctgctagacctctccacgatgacgatcgaagaggcgattggtcgcctcaaggtggtcgacggcgacgaaccacaggctctctctgggcctatccctatcggcgggaagctacatctcactcgggagcagtgggaggcctgccagggtgacaagaagcagggggagtcctcctcgacacgaggccgcaaacgcggcaagccgcgcaaggcgcgtggaggcgcccaggccggggcgcgaggacatgctgagggtggtgcacgtggaggtgcccaaggcggcgccgtcggcaacaagaagccggcacgagacgacggctgccacaactgcggcaagcttggccactgggccagggattgtcggcagctacgacgtggccaggccaacgtcgcacaggcggaggcggaggaggaggccctgctcctggcacatgcaagcatcgagccatctccagcggcaccggccgcagcggcactcctccaccttgatgagtcgaaagcacgcgctttcctcggcgacggctccaacaaggacatgatcgaaggatggtgcctcgacaccggcgccactcatcacatgaccggccgacgggagttcttcaccgagcttgactctagcgtccgaggctccgtcaagtttggggacgcctccggtgtagagatcaagggcgccggctcagtcgtcttcaccgccacgtctggtgagcacaggctgctcaccggagtctactacatccccgcgttgagaaactctatcatcagtttgggacagctggatgagaacggttcgcgcgtggaggtcgagcacggagtcatgaggatctgggatccctctcgtcgccttcttgccaaggtacgcaggagtgcaaatcggctttacatcctcaatgtgaaggtggcacaaccttgctgccttgctgctcgtcgagacgacggggcatggcagtggcacgagcgcttcgggcaccttaacttcgaagccttgaagcggctcagcgccaaggagatggtacgaggcctgccgtgccttgaccatgtggagcaattctgcgatgtctgcgtgttgacaaagtagagactgctccccttcccccagcagtcgagcttccgagccaaggagaggctcgagctcgtgcatggggacttgtgtggcccggtgacaccagccacaccaggaggacgacgctacttcttgctgctcgtcgacgatctctcccgctacatgtgggtgatgatccttggcagaaagggagaggctgcgaacgccatcaggcgtgtgcaggtcgctgcggaggcggagtgcggccgcaagctgtgatggaataagtcttgagcatctagaggacagcctgcttttgactgtcctctgtagtcctttagcatctagaggacagcttgactgtcctctgtagtctctttagcatctagaggacaacagtcgctttttgactgtcctctgtagtcgctttagcatctagaggacagcagtcgcttttgactgtcctctgtagtctctttagcatctagaggacaatcctgttgtatagtgtgtgtgagaaggtgtggtagtgcagcccctagggctataaatatgtgtccccaacccctctaagggtatggcattgtgtagtgtttgaagaaataaacagaaaattgccccaactcatagtgtcatcctctgatgagagttagagtccctctacttacaattggtatcagagccaaactatcctgcagcctaaacatctcgtgctcatctccttcccgtgcctctccccacactcagtcggtagcaagagctccaactgttccttcctcccctgctcaaacgagcagcctttcgtctgagacagcctcttccacacgcagcgacccctcactagcccaccatgtccctacgctcggccacttcgagtgcgcggcgccagcaggaggccgaggtcgccgcggcacaagaacgcgagcgagcagcagcagcggctgcagcgacagcggcgagggcagcacggttggcggcggcggaactggcagcggcgagagcggaagtagaagcagcggaggcggcggatgctgcacgtgcggcggcaacagagctcgaggttctgcgcggcagtagagctggcagctctgcttctgtcgacgacaacaccgacgacgagctcaggctggcgagggaagcagcgcgagagcaggcggcacagtgggcagccgcgcatccccatgggggcgcgcgtggcggcagcccggataggcgccgacacgctgacggcgctccaggcgggggcgcacgcggcggcagcccagacgggcgtagacgcgccggcggtgctctcggcggcggcgaccgagtcgacggagatcgcggcctctacaggcggcgcggttctccctccccggatcggtaccatggtcgtcgcatggcccaagccattgtcagggacatcggtcccgacggtgggtggcctaccctcaccaagaccaactacgtcgagtgggccgcggtgatgagggtacggctccaggttcgccacatgtgggaagcagttcgttacgacgacgtcgactaccacgaggatcggcgggcgctggatgctctcattgctgcagtcccgcccgagatgcagttttcgctttcccagaagcggactgccaagaaggcctgggacgccatcgctgcgacccgcatcggcagcgatcgtgcccgcaagaccacactgcagacacttcgcaaggagtgggagaacctggccttcaagccaggtgaggatgttgatgactttgctctctgcctcaacactctgttgcagaagatggtgcagttcggtgacgacacctacgatgaggagagagctgttgagaagctcttccgttgcatccccgagaagtacaggcagattgctcgctcgatcgagtctctgctagacctctccacgatgacgatcgaagaggcgattggtcgcctcaagggggtcgacggcgacgaaccacaggctctctctgggcctatcactatcggcgggaagctacatctcactcgggagcagtgggaggcctgccagggtgacaagaagcagggggagtcctcctcgacacgaggccgcaaacacggcaagccgcgcaaggcgcgtggaggcgcccaagccggggcgcgaggacatgctgagggtggtgcacgtggaggtgcccaaggcggcgccgtcggcaacaagaagccggcacgagacgacggctgccacaactgcggcaagcttggccactgggccagggattgtcggcagccacgacgtggccaggccaacgtcgcacaggcggaggcggaggaggaggccctgctcctggcacatgcaagcatcgagccatctccagcggcaccggccgcagcggcactcctccaccttgacgagtcgaaagcacgcgctttcctcggcgacggctccaacaaggacatgatcgaaggatggtgcctcgacaccggcgccactcatcacatgaccggccgacgagagttcttcaccgagcttgactctagcgtccgaggctccgtcaagtttggggacgcctccggcgtagagatcaagggcgccggctcagtcgtcttcaccgccgcgtctggtgagcacaggctgctcaccggagtctactacatccccgcgttgaggaactctatcatcagcttgggacagctggatgagaacggttcgcgcgtggaggtcgagcacggagtaatgaggatctgggatccctctcgtcgccttcttgccaaggtacgcaggagtgcaaatcggctttacatcctcaatgtgaaggtggcacaaccttgctgccttgctgctcgtcgagacgacggggcatggcagtggcacgagcgcttcgggcaccttaacttcgaagccctgaagcggctcagcgccaaggagatggtacgaggcctgccgtgccttgaccatgtggagcaattctgcgatgtctgcgtgttgacaaagcagagacgactccccttcccccagcagtcgagcttccgagccaaggagaggctcgagctcgtgcatggggacttgtgtggcccggtgaccccagccacaccaggaggacgacgctacttcttgctgctcgtcgacgatctctcccgctacatgtgggtgatgatccttggcagaaagggagaggctgcgaacgccatcaggcgtgtgcaggtcgctgcggaggcggagtgcggccgcaagctgtgatggaataagtcttgagcatctagaggacagcctgcttttgactgtcctctgtagtcctttagcatctagaggacagcttgactgtcctctgtagtctctttagcatctagaggacaatcctgttgtgtagtgtgtgtgagaaggtgtggtagtgcagcccctagggctataaatatgtgtccccaacccctctaagggtaatggcattgtgtagagtttgaggaaataaacagaaaattgccccaactcatagtgtcatcctcttgatgagagttagagtccctctacttacaattggtatcagagccaaactatcctgcagcctaaacatctcttgctcatctccttcccgcgcccctccccacactcagtcggcagcaagagctccaactgttccttcctcccctgctcagacgagcagcctttcgtctgagacagcctcttccacacgcagcgacccctcactagcccacgatgtccctacgctcggccacttcgagtgcgcggcgccagcaggaggccgaggtcgccgcggcacaagaacgcgagcgagcagcagcagcggctgcagcgacagcggcgagggcagcacggttggcggcggcggaactggcagcggcgagagcggaagtagaagcagcggaggcggcggatgctgcacgtgcggcggcaacagagctcgaggttctgcgcggcagtagagctggcagctctgcttctgtcgacgacaacaccgacgacgagctcaggctggcgagggaagcagcgcgagagcaggcggcacagtgggcagccgcacatccccatgggggcgcgcgtggcggcagcccggataggcgccgacacgctgacggcgctccaggcgggggcgcacgcggcggcagcccagacgggcgtagacgcgccggcggtgctcccggcggcggcgaccgagtcgacggagatcgcggcctctacaggcggcgcggttctccctccccggatcggtaccatggtcgtcgcatggcccaagccattgtcagggacatcggtcccggcggtgggtggcctaccctcaccaagaccaactacgtcgagtgggccgcggtgatgagggtacggctccaggttcgccacatgtgggaagcagttcgttacgacgacgtcgactcccacgaggatcggcgggcgctggatgctctcattgctgcagtcccgcccgagatgcagttttcgctttcccagaagcggacagccaaggaggcctgggacgccatcgctgcgacccgcatcggcagcgatcgtgcccgcaagaccacactgcaggcacttcgcaaggagtgggagaacctggccttcaagccaggtgaggatgttgatgactttgctctccgcctcaacactctgttgcagaagatggtgcagttcggcgacgacacctacgatgaggagagagctgttgagaagctcttccgttgcatccccgagaagtacaggcagattgctcgctcgatcgagtctctgctagacctctccacgatgacgatcgaagagtcgattggtcacctcaaggtggtcgacggcgacgaaccacaggctctctctgggcctatcactatcggcgggaagctacatctcactcgggagcagtgggaggcctgccagggtgacaagaagaagggggagtcctcctcgacacgaggccgcaaacgcggcaagccgcgcaaggcgcgtggaggcgcccaggccggcgcgcgaggacatgctgagggtggtgcacgtggaggtgcccaaggcggcgccgtcggcaacaagaagccggcacgagacgacggctgccacaactgcggcaagcttggccactgggccagggattgtcggcagccacgacgtggccaggccaatgtcgcacaggcggaggcggaggaggaggccctgctcctggcacatgcaagcatcgagccatctccagcggcaccggccgcagcggcactcctccaccttgatgagtcgaaagcacgcgctttcctcggcgacggctccaacaaggacatgatcgaaggatggtgcctcgacaccggcgccactcatcacatgaccggccgacgggagttcttcaccgagcttgactctagcgtccgaggctccgtcaagtttggggacgcctccggcgtagagatcaagggcgctggctcagtcgtcttcaccgccgcgtctggtgagcacaggctgctcaccggagtctactacatccccgcgttgaggaactctatcatcagcttgggacagctggatgagaacggttcacgcgtggaggtcgagcacggagtcatgaggatttgggatccctctcgtcgccttcttgccaaggtacgcaggagtctaaatcggctatacatcctcaatgtgaaggtggcacaaccttgttgtcttgctgctcgtcgagacgatggggcatggcagtggcacgagcgctttgggcaccttaacttcgaggccctgaagcggctcagtgccaaggagatggtacgaggcctgccgtgccttgaccatgtggagcaattctgcgatgtctgcgtgttgacaaagcagagatggctcccctttccccagcagtcgagcttccgagccaaggagaggcttgagctcgtgcatggggacttgtgtggcccggtgacaccagccacaccaggaggacgacgctacttcttgctgctcgtcgacgatctctcccgctacatgtgggtgatgatccttggcagcaagggagaggctgcgaacgccatcaggcgtgtgcaggtcactgcggaggcggagtgcggccgcaagctgcgcgtgctgcgcaccaacaacggcggcgaattcacgacggctgagttcgcgtcgtactgcgcggatgagggcgttcagcgccactactccgcgccgtacagcccgcagcagaacggcgtcgtcgagcggcgcaaccagacggttgtggggatggctcgggctctcctcaagcagagaggaatgccagctgtcttctggggagaggcggtggtgacagcgggttacatcctcaaccgctcgcccaccaaggctctcaacgggatgacaccgtacgaggcttggcatgggcgcaagccggcggtctctcacctacgggtcttcggctgcctcgcgttcaccaaggagcttggccacatcagcaagctcgacgataggagcaccccgggggtgttcattggctacgcggagggctcgaaggcctaccgcatctttgacccaagaacacagcgtgtgcgcacggcgcgcgacgtagtgttcgacgaagggcgaggttgggcgtgggacaaggcggtggacgacggcacgactccgacgtacgacttcaccatcgagtacgtccactttgagggagctgggggagtaggcaactcttctccgagcaggtctaccccagcccccaagtctccaccgcctccagcgccactctctccagctcctgctacaacgagctcttcaccaccacgcactccagccacgactccggctacagcgagctcttcgccaccacgtactccagcaccgacggtaccctctccgggaacgtcctctccgacaccagctcgtgtcgagcacgacccagtggagctcgtgacccctctgtcccgcgacgaggagcgcgtcgacgcgtgctacgccggcgagccgttgcggtatcgaagggtggagggccttctcatcgacccgtcggtgccaggccctgcatctcgcattctggcaggagagttgcatcttgcatgcgacgatggtgagcctcggtctttcgcggaggccgagcaacatgcggcttggcgtgccgcgatgcagtcggagatggacgcggttgagacgaaccgcacttgggagctcgctgatctccctcatggtcatcgcgcgatcacccttaagtgggtgttcaaactgaagagggatgaagccggcgccatcgtcaagcataaggctcgcttggtggcacgcggtttcttgcagcaggaggggatcgacttcgacgatgccttcgcccctgtagcacggatggaatccgtgcgactccttgcgctggcagccctggagggctggcatgttcatcacatggatgtcaagtcggcgtttcttaacggcgacttaaaggaggaggtctatgtacaccagccgccaggttttgcgatccctggcaaggagggcaaggtgttgcgcctgcgcaaggctctctacggcttgcgacaggcaccaagggcgtggaatgccaagctggattccacgctcaagaggatgggcttcatgccaagcccgcacgaggcggccatctatcgacggggcaatggagaaaatgccctgctggtgggtgtctacgtcgacgacttggtgatcaccggcgccaaggatgcagaggtggcagcgttcaaggaagagatgaaggccaccttccaaatgagtgacctggggcatctctccttctacctggggattgaggtgcaccagggagactccgggatcacacttcgccagaccgcctacgccaagcgcattgttgagctggctgggctcatcgactgcaacccagctctcactccgatggaggagaggctgaagctgagtcgcgacagcacgacgaaggaggtggatgctacacagtaccggcgtcttgtggggagccttcgctacctcgtccacacacggcctgacttggcatactccgtcggctacgttagtcggtttctgcagcgatcgacgacggagcatgagcaggctgtgaagaggatcatccgctatgttgcggggactctcgaccacggtctctactacccgaggtgccctggggaggcacaccttgtcgggtacagcgatagcgaccacgccggcgacatcgacaccagcaagagcacaagcgggatcctcttcttcctcggcaagtgccccatcagctggcagtcggtcaagcagcaggtggtggccatgtccagctgcgaggccgagtacatagcagcgtccactgcttcgactcaggctctctggctggctcgactgctcggtgatctcctcgggagagacactggagcggtggaactcagggtggacagccagtccgctctggcattggccaagaaccccgtgttccatgaacggagcaagcacatccggctgagataccacttcatccgagactgcttggcagaagggagcatcaaggcgtgctacatcaacaccaaggatcagcttgcagacctgctcaccaagccccttgggaagatcaagtttgttgagctttgctccaggtccgggatggcccaactttctcacaagacgacgcccaagacttagggggagaatgatggaataagtcttgagcatctagaggacagcctgcttttgactgtcctctgtagtctctttagcatctagaggacagcagtcgctttttgactgtcctctgtagtcgctttagcatctagaggacagcagtcgcttttgactgtcctctgtagtctctttagcatctagaggacaatcctgttgtatagtgtgtgtgagaaggtgtggtagtgcagcccctagggctataaatatgtgtccccaacccctctaagggtatggcattgtgtagtgtttgaggaaataaacagaaaattgccccaactcatagtgtcatcctcttgatgagagttagggtccctctacttacaagctgcgcgtgctgcgcaccgacaacggcggcgaattcacggcggctgagttcgcgtcgtactgcgcggatgagggcgttcagcgccactactccgcgccgtacagcccgcagcagaacggtgtcgtcgagcggcgcaaccagacggttgtggggatggctcgagctctcctcaagcagagaggaatgccagctgtcttctggggagaggcggtggtgacagcggtttacatcctcaaccgctcgcccaccaaggctctcaacgggatgacaccgtacgagacttggcatgggcgcaagccggcggtctctcacctacgggtcttcggctgcctcgcgttcaccaaggagcttggccacatcagcaagctcgacgataggagcaccccgggggtgttcattggctacgcggagggctcgaaggcctaccgcattcttgacccaagaacacagcgtgtgcgcacggcgcgcgacgtagtgttcgacgaagggcgaggatgggcgtgggacaaggcggtggacgacggcacgactccgacgtacgacttcaccatcgagtacgtccaatttgagggagctgggggagtaggcaactcttctccgagcaggtctaccccagcccccaagtctccaccaactccagcgccacactctctagctcctgctacaacgagctcttcaccaccacgcactccagccacgactccggctacagcgagctcttcgccaccacgtactccagcaccgacggtaccctctctgggaacgtcctctccgacaccagctcgtgtcgagcacgacccagtggagctcgtgacccctctgtcccgcgacgaggagcgcgtcgacgcgtgctacgccggcgagccgttgcggtatcgaagggtggagggccttctcatcgacccgtcggtgccaggccctgcatctcgcattctggcaggagagttgcatcttgcatgcgacgatggtgagcctcggtctttcgcggaggccgagcaacatgcggcttggcgtgccgcgatgcagtcggagatggacgcggttgagacgaaccgcacttgggagctcgctgatctccctcatggtcatcgcgcgatcacccttaagtgggtgttcaaactgaagagggatgaagccggcgccatcgtcaagcataaggctcgcttggtggcacgcggtttcttgcagcaggaggggatcgacttcgacgatgccttcgcccctgtagcacggatggaatccgtgcgactcctcctcgcgttggcagccctgaagggctggcatgttcatcacatggatgtcaagtcggcgtttcttaacggcgacttaaaggaggaggtctacgtacaccagccgccaggttttgcgatccctggcaaggagggcaaggtgttgcgtctgcgcaaggctctctacggcttgcgacaggcaccaagggcgtggaatgccaagctggattccacgctcaagaggatgggcttcatgccaagcccgcacgaggcggccatctatcggcggggcaatggaggaagtgccctgctggtgggtgtctacgtcgacgacttggtgatcaccggcgccaaggatgcagaggtggcagcattcaaggaagagatgaaggccaccttccaaatgagtgacccggggcacctctccttctacctggggattgaggtgcaccagggggactccgggatcacacttcgccagaccgcctacgccaagcgcattgttgagctggctgggctcaccgactgcaacccagctctcactccgatggaggagaggctgaagctgagtcgcgatagcacgacggaggaggtggacgctacacagtaccggcatcttgtggggagccttcgctacctcgtccacacacagcctgacttggcatactccgtcggctacgttagtcggtttctgcagcgaccgacgacggagcatgagcaggctgtgaagaggatcatccgctatgttgcggggactctcgaccacggtctctactacccgaggtgccctggggaggcacaccttgtcgggtacagcgatagcgaccatgccggcgacatcgacaccagcaagagcacaagcggaatcctcttcttcctcggcaagtgccccatcagctggcagtcggtcaagcagcaggtggtggccatgtccagctgcgaggtcgagtacatagcggcgtccactgcttcggctcagacgctctggctggctcgactgctcggtgatctcctcgggagagacactggagcggtggaactcagggtggacagccaatctgctctggcattggccaagaaccccgtgttccatgaacggagcaagcacatccggctgagataccacttcatccgagcctgcttggcagaagggagcatcaaggcgcgctacatcaacaccaaggatcagcttgcagacctgctcaccaagccccttggtaagatcaagtttgttgagctttgctacaggtccgggatggcccaactttctcacaagacgacgcccaagacttagggggagaatgatggaataagtcttgagcatctagaggacagcctgcttttgactgtcatctgtagtcctttagcatctagaggacagcttgactgtcctctgtagtctatttagcatctagaggacagcagtcgcttttttgactgtcctctgtagtcgctttagcatctagaggacaacagtcgcttttgactgtcctctgtagtcgctttagcatctagaggacaatcctgttgtgtagtgtgtgtgagaaggtgtggtagtgcagcccctagggctataaatatgtgtccccaacccctctaagggtatgccattgtgtagtgtttgaagaataaacagaaaattgccccaactcatagtgtcatcctcttgatgagagttagagtccctctacttacagagccatctccagcggcaccggccgcagcggcactcctccaccttgatgagtcgaaagcacgcgttttcctcggcgacggctccaacaaggacatgatcgaaggatggtgcctcgacaccggcgccactcatcacatgaccggccaacgggagttcttcaccgagcttgactctagcgtccgaggctccgtcaagtttggggacgcctccggcgtagagatcaagggcgccggctcagtcgtcttcaccgccgcgtctggtgagcacaggctgctcaccggagtctactacatccccgcgttgagtaactctatcatcagcttgggacagctggatgagaacggttcgcgcgtggaggtcgagcacggagtcatgaggatctgggatccctctcgtcgccttcttgccaaggtacgcaggagtccaaatcggctatacatcctcaatgtgaaggtggcacaaccttgctgccttgctgctcgtcgagacgacggggcatggcagtggcacgagcgcttcgggcaccttaacttcgaagccctgaagcggctcagcgccaaggagatggtacgaggcctgccgtgccttgaccatgtggagcaattctgcgatgtctgcgtgttgacaaagcagagacgactcccctttccccagcagtcgagcttccgagccaaggagaggctcgagctcgtgcatggggacttgtgtggcccggtgacaccagccacaccaggaggacgacgctacttcttgctgctcgtcgacgatctctcccgctacatgtttgtgatgatccttggcagcaagggagaggctgcgaacgccatcaggcgtgtgcaggtcgctgcggaggcggagtgcggccgcaagctgcgcgtgctgcgcaccgacaacggcggcgaattcacggcggctgagttcgcatcgtactgcgcggatgagggcgttcagcgtcactactccgcgccgtacagcccgcagcagaacggcgtcgtcgagcggcgcaaccagacggttgtggggatggctcgggctctcctcaagcagagaggaatgccagctgtcttctggggagaggcggtggtgacagcgggttacatcctcaaccgctcgcccaccaaggctctcaacgggatgacaccgtacgaggcttggcatgggcgcaagccggcggtctctcacctacgggtcttcggctgcctcgcgttcaccatggagcttggccacatcagcaagctcgacgataggagcaccccgggggtgttcattggctacgcggagggctcgaaggcctaccgcattcttgacccaagaacacagcgtgtgcgcacggcgcgcgacgtagtgttcgacgaagggcgaggatgggcgtgggacaaggcggtggacgacggcacgactccgacgtacgacttcaccatcgagtacgtccaatttgagggagctgggggagtaggcaactcttctccgagcaggtctaccccagcccccaagtctccaccaactccagcgccacactctctagctcctgctacaacgagctcttcaccaccacgcactccagccacgactccggctacagcgagctcttcgccaccacgtactccagcaccgacggtaccctctccgggaacgtcctctccgacaccagctcgtgtcgagcacgacccagtggagctcgtaacccctctgtcccgcgacgaggagcgcgtcgacgcgtgctacgacggcgagccgttgcggtatcgaagggtggagggccttctcctcgacccgtcggtgccaggccctgcatctcgcattctggcgggagagttgcatcttgcatgcgacgatggtgagcctcggtctttcgcggaggccgagaaacatgcggcttggcgttctgcgatgcagtcggagatggacgcggttgagacgaaccgcacttgggagctcgctgatctccctcatggtcatcgcgcgatcacccttaagtgggtgttcaaactgaagagggatgaagtcggcgccatcgtcaagcataaggctcgcttggtggcacgcggtttcttgcagcaggaggggatcgacttcgacgatgccttcgcccctgtagcacggatggaatccgtgcgactcctcctcgcgctggcagccctggagggctggcatgttcatcacatggatgtcaagtcggcatttcttaacggcgacttaaaggaggaggtctacgtacaccagccgccaggttttgcgatccctggcaaggaaggcaaggtgttgcgcctgtgcaaggccctctacggcttgcgacaggcaccaagggcgtggaatgccaaactggattccacgctcaagaggatgggcttcatgccaagcccgcacgaggcggccatctatcggcggggcaatggagaaaatgccctgctggtgggtgtctacgtcgatgacttggtgatcaccggcgccaaggatgcagaggtggcagcattcaaggaagagatgaaggccaccttccaaatgagtgacccggggcacctctccttctacctggggattgaggtgcaccagggggactccgggatcacacttcgccagaccgcctacgccaagcgcattgttgagctggctgggctcaccgactgcaacccagctctcactccgatggaggagaggctgaagctgagtcgcgatagcacgacggaggaggtggacgctacacagtaccggcgtcttgtggggagccttcgctacctcgtccacacacagcctgacttggcatactccgtcggctacgttagtcggtttctgcagcgaccgacgacggagcatgagcaggctgtgaagaggatcatccgctatgttgcggggactctcgaccacggtctctactacccgaggtgccctggggaggcacaccttgtcgggtacagcgatagcgaccatgccggcgacatcgacaccagcaagagcacaagcggaatcctcttcttcctcggcaagtgccccatcagctggcagtcggtcaagcagcaggtggtggccatgtccagctgcgaggtcgagtacatagtggcgtccactgcttcggctcagacgctctggctggctcgactgctcggtgatctcctcgggagagacactggagcggtggaactcagggtggacagccaatccgctctggcattggccaagaaccccgtgttccatgaacggagcaagcacatccgactgagatagcacttcatccgagcctgcttggcagaagggagcatcaaggcgcgctacatcaacaccaaggatcagcttgcagacctgctcaccaagccccttggtaagatcaagtttgttgagctttgctccaggtccgggatggcccaactgtctcacaagacgacgcccaagacttagggggagaatgatggaataagtcttgagcatctagaggacagcctgcttttgactgtcatctgtagtcctttagcatctagaggacagcttgactgtcctctgtagtctctttagcatctagaggacagcagtcgcttttttgactgtcctctgtagtcgctttagcatctagaggacaacagtcgcttttgactgtcctctgtagtcgctttagcatctagaggacaatcctgttgtgtagtgtgtgtgagaaggtgtggtagtgcagcccctagggctataaatatgtgtccccaacccctctaagggtatgccatagtgtagtgtttgaagaaataaacagaaaattgccccaactcatagtgtcatcctcttgatgagagttagagtccctctacttacagagccatctccagcggcaccggccgcagcggcactcctccaccttgatgagtcgaaagcacgcgttttcctcggcgacggctccaacaaggacatgatcgaagaatggtgcctcgacaccggcgccactcatcacatgaccggccaacgggagttcttcaccgagcttgactctagcgtccgaggctccgtcaagtttggggacgcctccggcgtagagatcaagggcgccggctcagtcgtcttcaccgccgcgtctggtgagcacaggctgctcaccggagtctactacatccccgcattgagtaactctatcatcagcttgggacagctggatgagaacggttcgcgcgtggaggtcgagcacggagtcatgaggatctgggatccctctcgtcgccttcttgccaaggtacgcaagagtccaaatcggctatacatcctcaatgtgaaggtggcacaaccttgctgccttgctgctcgtcgagacgacggggcatggcagtggcacgagcgcttcgggcaccttaacttcgaggccctgaagcggctcagtgccaaggagatggtgcgaggcctgccgtgccttgaccatgtggagcaattctgcgatgtctgcgtgttgacaaagcagagacggctcccctttccccagcagtcgagcttccgagccaaggagaggctcgagctcgtgcatggggacttgtgtggcccggtgacaccagccacaccaagaggacgacgctacttcttgctgctcgtcgacgatctctcccgctacatgtgggtgatgatccttggcagcaagggagaggctgcaaacgccatcaggcgtgtgcaggtcgctgcggaggcggagtgcggccgcaagctgcgcgtgctgcacaccgacaacggcggcgaattcacggcggctgagttcgcgtcgtactgcgcggatgagggcgttcagcgccactactccacgccatacagcccgcagcagaacggcgtcgtcgagcggcgcaaccagacggttgtggggatggctcgggctctcctcaagcagagaggaatgccagctgtcttctggggagaggcggtggtgacagcgggttacatcctcaaccgctcgcccaccaaggctctcaacgggatgacaccgtacgaggcttggcatgggcgcaagccggcggtctctcacctacgggtcttcggctgcctcgcgttcaccaaggagcttggccacatcagcaagctcgacgataggagcaccccgggggggttcattggctacgcggagggctcgaaggcctaccgcatccttgacccaagaacacagcgtgtgcgcacggcgcgcgacgtagtgttcgacgaagggcgaggatgggcgtgggacaaggcggtggacgacggcacgactccgacgtacgacttcaccatcgagtacgtccactttgagggagctgggggagtaggcaactcttctccgagcaggtctaccccagcccccaagtctccaccgactccagcgccacactctccagctcctgctacaacgagctcttcaccaccacgcactccagccacgactccggctacagcgagctcttcgccaccacgtactccagcaccgacggtaccctctccgggagcgtcctctccgacaccagctcgtgtcgagcacgacccagtggagctcgtgacccctctgtcccgcgacgaggagcgcgtcgacgcgtgctacgacggcgagccgttgcggtatcgaagggtggagggccttctcatcgacccgtcggtgccaggccctgcatctcgcattctggcaggagagttgcatcttgcatgcgacgatggtgagcctcggtctttcgcggaggccgagaaacatgcggcttggcgtgctgcgatgcagtcggagatggacgcggttgagacgaaccgcacttgggagctcgctgatctccctcatggtcatcgcgcgatcacccttaagtgggtgttcaaactgaagagggatgaagccagcgccatcgtcaagcataaggctcgcttggtggcacgcggtttcttacagcaggaggggatcgacttcgacgatgccttcgcccctgtagcacggatggaatccgtgcgactcctccttgcgctggcagccctggagggctggcatgttcatcacatggatgtcaagtcggcgtttcttaacggcgacttaaaggaggaggtctacgtacaccagccgccaggttttgcgatccctggcaaggagggcaaggtgttgcgcctgcgcaaggctctctacggcttgcgacaggcaccaagggcgtggaatgccaagctggattccacgctcaagaggaagggcttcatgccaagcccgcacgaggcggccatctatcggcggggcaatggagaaaatgccctgctggtgggtgtctacgtcgacgacttggtgatcaccggcgccaaggatgcagaggtggcagcattcaaggaagagatgaaggccaccttccaaatgagtgacttggggcatctctccttctacctggggattgaggtgcaccagggagactccgggatctcacttcgccagaccgcctatgccaggcgcattgttgagctggctgggctcaccgactgcaacccagctctcactccgatggaggagaggctgaagctgagtcgcgacagcacgacggaggaggtggatgctacacagtaccggcgtcttgtggggagccttcgctacctcgtccacacacgacctgacttggcatactccgtcggctacgttagtcggttcttgcagcgaccgacgacggagcatgagcaggctgtgaagaggatcatccgctatgttgcggggactctcgaccacggtctctactacccgaggtgccctggggaggcacaccttgtcgggtacagcgacagcgaccacgccggcgacatcgacactagcaagagcacaagcgggatcctcttcttcctcggcaattgcctcattagctggcagtcggtcaagcagcaggtggtggccatgtccagctgcgaggccgagtacatagcggcgtccactgcttcgactcaggcgctctggctggctcgactgctcgnnnnnnnnnnnnnnnnnnnnnnnnnnnnnnnnnnnnnnnnnnnnnnnnnnnnnnnnnnnnnnnnnnnnnnnnnnnnnnnnnnnnnnnnnnnnnnnnnnnnnnnnnnnnnnnnnnnnnnnnnnnnnnnnnnnnnnnnnnnnnnnnnnnnnnnnnnnnnnnnnnnnnnnnnnnnnnnnnnnnnnnnnnnnnnnnnnnnnnnnnnnnnnnnnnnnnnnnnnnnnnnnnnnnnnnnnnnnnnnnnnnnnnnnnnnnnnnnnnnnnnnnnnnnnnnnnnnnnnnnnnnnnnnnnnnnnnnnnnnnnnnnnnnnnnnnnnnnnnnnnnnnnnnnnnnnnnnnnnnnnnnnnnnnnnnnnnnnnnnnnnnnnnnnnnnnnnnnnnnnnnnnnnnnnnnnnnnnnnnnnnnnnnnnnnnnnnnnnnnnnnnnnnnnnnnnnnnnnnnnnnnnnnnnnnnnnnnnnnnnnnnnnnnnnnnnnnnnnnnnnnnnnnnnnnnnnnnncgagagctgtctcactgagttgtgagtttgaagcagtctttccgcatttgcgcggggggggggtgatggaataagtcttgagcatctagaggacagcctgcttttgactgtcctctgtagtcctttagcatctagaggacaacagtcgctttttgactgtcctctgtagtctctttagcatctagaggacaacaatcgcttttgactgtcctctgtagtcgctttagcatctagaggacagcagtcgctttttgactgtcctctgtagtctctttagcatctagaggacaatcctgttgtgtagtgtgtgtgagaaggtgtggtagtgcagcccctagggctataaatatgtgtccccaacccctctaagggtatagcattgtgtagtgtttgaggaaataaacagaaaattgacccaactcatagtgtcatcctcttgatgagagttagagtccctctacttacagggggagacttgtctcggtttatccctcccttagaccccactcatgtgggagcctccgacattggatgtactctatttgttttaaatatatgcagataaatattattttctaacaatggtgctaattcatgtataaaagtaaggagtaaaatgcatcaggtccccgaactctcaaaactaggattacgtgtcttcgaacttgacgtcttggccggtcatccaaaaccagatttgctcaaactggatgccgatgtggcgtgccatgttggagtcactttggtccccgaacttggcatgctgtatcacttgggtctcagaacttggcattttgtgccacttggcttcccgaactttctttagtacgcttcagcgtggcatgctacgttggcatcgggtttgaacaaactcggttttggatggccgactaagttcgaggacccgttttgctggttttgaaaattcgatgacccaagtgacaaatcatgctaagttcgaggaccactgatgtattttactcaaagttaagttttgggatgtgtttattgggctagggcatgctagtggggtttctctcgttgcaaaacaggggcttgtttgcaaatagttctaaaggcaccttgtgtgtgaaatgtgggttctgtgtgccaatgtcaacaagttttatggatcttgattatagatcgaattgctagaaatatagtagttcaaacagatattggaactggagctacaatttagtcattaatatactattacttcaagtatgtatgggtatcaactatcaaacataggttgtgtttgcttcagcatctgaaaagtgcttctgctctactttattgtattacaatttaactagcaccttggactatacttttggcttccaaccttttacttctccaaatggttggaaacagaaagaaattttacatgtgtatccagggcatgcttatcaagacgtccattaagcgtcacattagagtcgctttagcgctaaggcgcactcacagggcaaggcgtctagcttgccttgtgctggggagtaagacgtccgccgcggcgtaaggcgctggtggggcgtcggcagggcgttctcggagcgtcggcggggcgacgcttaggggataggtagggttttgaagggcgacggctggaaacagagaagagggtttgacctgtgtctgtgtggcagctgcagctgctgcctccttcctcgtcggcgcgcagtgctccggccatcggaggtgggagactgcggtggaagaaccgagggagagagagagaggagagctgtgggggagggagagagaggggactgaagagagatgcagcgtgagggaaaaatagaggctggcggctgctactaggttgctggcggctgtgacctaaaactgtgttttgggctgagctgggccgagttgggctggactcacttgttgtgaggttctttcctgccttttttttctgcttctactagactgaaattggacatattagaccttataaaagtgctagcttgcttattaactttaaattagtgatatataaataatgtttgatctaatttttttgatatttatctatataactaaggcctcgcctcgccttacgctttatcgcctaaaagataaaagagggttggtcgccttatgtcgccttaccgccttaataactatgatcaagggagagaaagaaaggggtaggcttcatagttgtttcaaccaaacaatttatctttttcatagtgcatagctcacatcatcttttccaaagctcacaactcacaacaacttttctatagcttagttgacccaaacaagcccataattgctttttgtttggacctaccagctaattactcatgtgagagcctctgacactaggtttgtcctactaactaactacacaacacatcataggtacgtaacctttagctctctagaaaacttgggcaagtaattcagccaccctgaaatggtgctctataaatgtctcggcttgccaaattttgtttgggccagccaaaatttgacctccaccttgggctcaactctctgaccatattgggcgcttggatcatatggaatggaaccactgtaactgttgttttattgatttttttctcgaaaagcgcaggagaactgcaccccattatattaagaccgttgtttttattgatgctaagtgtttctgaagccatgatcgtggcaggagaagagcgtcaactttggtctatgacaggggctagaggaatctcctgcttgattgtccccaaggttttgagtgcttttttagatgggacattctatgtctcctttttaatcagtgtgtttgtaactattaaatgtggtgtttgttgtgtgggttgtggttcctaaccgaatttcttcttaatataataaagtgccatctctactgcattttcgagaactttttttgacctccaagtggttgccagattgttggggcacgaccaaattttgattttgcatcctatgagtctcatactaaacgtgtcgtgaatatccttgttttatccatgatcattcatttattcatttgcttgtgccttctgtgtagacatgttttttttgcaggtatatgtgtggttgcacactcataagttgcagttgctactaccttgttagttagtctatggttttgctgctttgattgaaccaaaataaaatgttagttgcaaacttttgtcaactcagctgtgtctgtcatttgtttagtattgtcctccattatcattaaggatcagagactttgtaaatggattagtttttcatgaatgttatgatgaaaaatgatattgttctgttctttaaatatattctttgctcgcaacttatattaattgtccttgggctatgttctcatgtctattgcaggttgaatgtttacttgtagaaggtgtcttgggcaaaaggaatcttgtgtattgtgcatccacgaggtgtttgcagatctttcatgtcgttcatacatggacatacctacacacttcacattctcagatgcgtactgtttttttttcaaattccttttctatctaatcttatgtgtatattttttgttgttaaatttgcagtgctggtaaaagttttgttgctgaagttctgatgttgaggcagatactgtcaactgggaatatggcaattcttgtccttccctatgtgtcaatatgcgctgaaaaggtttttgatgatttatacagctttggattggtctgaaacatacttgtgtttgattatttatttatcttttacaggctgaacatcttgaacaacttcttgagccactgggtaggcatgtccgtagcttctacggaaaccaggggggaggctcacttcctaaagatacagcagttgctgtatgtaccatagagaaggcaaactctttggtaaacaagttgttggaggatggccgcctctctgaacttggtgtaattgtcatagatgaacttcatatggtaagcttgtctaaaaccgaagtgctgctcagaacatcctctctttgctttaaaccttttgttgttggtactttcatggttatttataccacatctattttgttatgcaagttcattgccttaggaactgtcatttcagcaatctaggtttgtgacagcattgagagtactaacgtaattttgtaacatttccattgtttgtaatcttttaatagcatgcacgagataattgccatttaatgaggatatttgttggcctgttgttagctattagtgctccttggccagtgtgcattgtggaattggatttgttttatgaaacagatggagcactagagatctggtactatctggaatctaaaaagtagagcgtgtgcattttgtatgactttcttctttaattaatacaatgatacagaactctcctgcatattgaagaaaaaacgatgtacaattgcattgcaagtagtagaggttttatcattgctaactaagagcactacaaattcttgtataggtggtgtatgtggtattggtgtactgcatatatcaatcagaacttcaaatatgatttttcctctcccccttctctccgcctgggccgttagggagtgaattcagtccaacgcctaggggctagggccaccaatctagtccaagtgatgtacctttccctactgcatcattgtttagttttttaggtgttcttttttgttcaaggtttgggatggttagtcatcaacttatcacccatcctatctaatcaagtaatcttgtgtgttactttacctgttacccgagtttccatattgttaggttataatcattaagagtaatttgtaaataagaaaggtttgtcattatggacaattgccagtaaacaagaaacaacaaggagaagtaccattggtcctggcgctgaatgaattctggcagcatacttatcaaatgcaaatcatataggaagatttgactttccttagggctcccctcatatatttgtaatattaggcccaggaccaatagtctcccagctcgccattcggctaaagcactatggcagtattactatttagcaacccctaccaaaggaagcatatagcttgcatctttacctgtctttgtttacctttccatgcccttgagggttctttcaatctttcttcctgtatcctttgacttagtttgtcgaacatgatgtgatatatagttgaaacttgttaagttctccaattatgcaattaaattaacaggttggtgaccaacatagaggatatcttttagagctgatgttgacaaagcttcgatatgctgctggtgaagggactttacagtcatgtagcggagaagtttcaagttctagcagtgggaagattgcaagtcatgggttgcagataattggtatgagtgctactatgcccaacatcgctgcggtggctgattggcttcaagtaagatatttaattctcctagttttatgtacttaatgaagggatgttttactagtgtgagaaacaacattactaacccacagaagttcaacttagcattgtcgttcatttatcatattagaaagttcaaaggcatttgataaatatgtgagcaattgaacttcctaattccacttgtattttctttcatcaactttttaaggttttttttgctgtctttcttcaaacctatagcctaacatgatatcttcatcaatattatctgatcgtatgatcgaggctactcgtatgaccaccgatcatatgactaatcactattagtcatcgattagttggtctagccagctagtcgaacatttagttgtccatgtgcctagatgacctaatcgaccatgccgagttagtatccatcgctagtctccttcgcgtcgccccacatgggcaacacgggcggaaccaaccctagcaacgcaccttcttcctcacctgattctcctcaccgtcactagagcgcgacttcacaaggaaggcaatggcatgtcattctcctctgcctcgtgatcatcgactctatcaagctcctctaccatggtttgagaaggtgctcctcccagtggccaatctctagattctagatccaccgatctctaggccagacctgcgctggttgggcctatggtggccacacagtggcagtgcagttgtcccctctcctctcacaactcttcgttcgtctttggtgggtgatgcctagatccatcgtcactgtagccggatcaggcatctcccgtgacaacggatctgcggagggcgacaacccttgtggtcccaacttcattttcaagcatgttcgggtgcttctcggctctagcactcggtcaactttggcttggcattggcatgtggcgcaaatgcaatagcaactgcattgctagcttgcatggccaccaaggatgggtgctcttagtgaggcaaacaagtgccaaacctgcaaccatgacataggagatggtgggcttgctcaggcttgcgttggtgtttgtcggtacctcaagactagggtacccactcctactggatcaaggcgggacccctgtggctatccctagtcgcatagccacaggtggtccgccctggctcagaatataggttcgtccgacgaggccgctggcctcaggtgggggccaacttccatgttgggctcttcagatccctagcagcggggctccgaagccgccacatgctccaagtatggggactccctacagctttgcctaggggcctgaccccctctgggtggtcccggacacctgcgtatgctacttgaacctccgacttaaagaggtccggtattgccacgtgtttaggcccgtgccagagggtcccggactcctctgagtaccttccgaacccccaactagtggtgctccggatctgccacgtctacagacactcctggctgattgctccctgctcgggtaaagatccggtgctgccacgtgtcttatggcgtgtgacataagccgtcgggaagagcctggcgtaagcctctggcaaggggaagggccacctgtgttcaaggcgggcagagtgcgcggctgttcacacaagtaatagatggcgcgtaccccgcattaaatgtaggtggcgtgcgcaacctgcaaggcctgcccgcgtcagaatcgcgttaccaaggcaagcccattgcgtagcttggacgcccttcattatgacttctattcctcgcgtgttattgaggcatgagggaacaggcggaggggacgggatgacaccgtccttattctccctacgctcacctacgccgcaacctacgttgtagcctttgcccacatgtcgtagcccctcctcatcttaggattagggcgggtgttatccgtcacctgtctggagtttacctctgaccgtgttgatgtttgtgtggttcgtctctaggtggtctttatagggcacgacaaccatggttggctacaacgagccttgtttgtgggcgtagcttttcacctgcaatggctctgaactagctcgagagttgcatgcggtggtggacgacaatcaacttcaccaggactacatgagtaactatgttgactacacatgttggtgtgaggagagatcttggtgcaagatttggttagtattatcttgagtcgatgatgataacacctttggggggggtgccattcccttttttggaagcgtcgatgaggtgccgtctctccttaccccacgatttgttttgaagaagctctgcctagggtccctaggctggtgatggcggcgcccagcgtcgtatcctgcctgagggcatcaccttgatcccgtactaccatggttgttggtccgcatgggacatttgctgcttgtttgtaagcctcaggttttgatgagttcgctacttgcttaaagcatgtcttttgctctcctagggtagatcaataggtgaagtcagagctgcttttgtggggtgcaacaaagcttggcaatgatgacacattatgttcacttccttcaaaagccgggtcttgttgtgagtaggtggtggtgtgttagggctttggctgatgttcgttgtgggaaatcagatctacgtatcacttttgtgggataagctcgacatcgatgacgtgtggtgtgctctgttggttgtttttgtgtatgtgggttgcttaggattagtcgtatgggttgttgtgtttaggtattggccggttttcctttgataaactgtgtgatgtggtgttttatccctgggtttccttataacctaggtcaattctatttcttaattgaaacttcctagttcctactgcgttaaaaaatgacctgatcaaccatgtatataaataaatttgatataaattggtgaatgggagaggcaagcaaccaagcacattaataacatttccaccttcctctccggcgcggacgtcgcccacctctacgcgtctagcatcgccgccgccgctactacggctccccaggcgttcaccgtgaccaccgccgctgctgcagccactgcggctggactcctacccccaacctctatagcagcctcgacctccctggctacctgacctccacggccgccttcagtgccgcctcgacattcgggactctctccccgaccgacttctcccggcagtcgcccctcggtttcaccgcccgcctgtcgtcgacgtcacttgggctccaccacgtgccgtcgcgccgtccaacgactccgccttggtcgctgccatcgccaccatccaggccgccgtggccgcctcacaggagcgccaacgcgtcgcattactccctctggagcaggaatgggccatgggttaggccctgaccactcagctggccacggctcagcgtatgcttctcggtcgtggcaccccgccaccaccggcagtgcttgcggctcccctggtggtcccggagcctcctcatggctctgggcttgacgtcgacactatcgccgccctccacgcctaggccgctggggttcacaacatacagtccctcatgttggacccgacgtcctcccactaacctcactggcgcgctcaggtggtcctcacccttcggcgtttgccctcactgaccacgtcctcgacgatctcgttgcctcgctgtccccctcctgggtctagatggacaacgtggtcctatcgtggctcaacgacacaatcaccgttgagctgcaggacatcgtctgtgatcaggcagacactgcgcgccagacatggcttgctctcgagggccagttccccaggaaccaggaggctcgggtgctccacctcgacgtccagttccatctgttttctcaggggacctctctgtgggagagtactgccgccagatgaagggcatggcgaactctctccgcgacctcggtgagcctgtcgccgacaacaccaaggtgctgaaccttctacgtggcctcagcccccgctacggccaccggaaggctctcatcaagaggaccgtgcctcaactcccgctatggtcctctcatcaagaggaccatgccgtgcggaacgagcttctttttgagtagctcaccatggagaccgaggctcctccggcatcgacactctacaacgctcctcccggcggtcagacaccctcggggggccaggcctctcgctctccatcgaccgaggcccctgctcgccatccacccgctgtcattgcgactcctcgtccggctttcaccgccgacggaggtcgtcgctccctcaagggcggccgtggggtggcagctccacccgtggtggtccctccggccggggtggcggccaggcgtgaccgtcattctacaacccctggaccaggaccatcgccatgtggccgggctaggcctcgagtgcctcccgctttccggcgtcggccctccagacagcgcctccctacgacgtgccttcgatgcctccctacggcgtgccaccaacgcctccggccgcgccctagcacccgccccgaggaccaccacctcgacgccttggtccccgctggctggcggatggggccctgcatccctcgtcaccgccttcagcaccatggcgatgaccccaccccctccgactgggtggttgattccgagcttcttaccacacaactcccactgcagacacgctctctttgtcccatcccatccattcctcccacccctcctggatcctcgttggcaacgataccactttgccggtcacctcaataggtgcctcggttttccctgggccgttctatctcaacgacgttctcgtagcccctcacataactcacaatcttctttctgttcgtcggttcaccaccgacaacttttgttccattgagtttgacccctctggttttctgtgaaggatctagccacatgacccctctcacccgctgtgacagcgccaagcccctctacacgcttcggccttccaccaccgacgcgtctccacctcccgtcctggtctccaccaccacctctaccacgtgacatcattgtctcggccacccaggacctgatgtcatgaccaaacttaacaacaatttagatccttcatgtagtaggggacattttgatggtctctgtcatgcttgtcagttagaccgacatactcgtctcccattcaccactttttggtttgaggagtcttttgacctggttcattgtgatctctgtacctcccctatactcaatctctttggttataaatactatttggtcattttggatgatttttcccattttctttggacctttcctcttcggttgaagtccgacacgttcaccaccctcacacacttcttcacctaggtctccactcagttccgtcgcccggtccgtgccctacagtgtgacagtggccgcgagttcgacaaccatgcctcccgttctttctttctcaccaacggcgtccagttgcgtctctcgtgcccctacacctctttccagaacggccgggccgaccgcataactctttctcaccatttgctgccttctcttccaggcgtctgtccctgccagctactggggtgaggccctacacaccgccacacaccttctcaactctcttccctcgaaggcggtgagccaccctactcccacttcgccctgtacgacacaaccccttcctacgaccaccttcgcgtgtttggctgtgcctgttatgctaacacttccgccatcgctcctcataagctatctccttgctccactcgctgtctcttccttggctagtcccctgaccacaaagggtattgctgtcttgacctcagctcgcaccgtatcatcatctctcgtcatgtcgtcttcgacgaagatgtgtttccttttgctggctcctcccacccaccgatctcgactccctacttgagtctgatccggttacccctctataagtagatggactctaactctcatcaagaggatgacactataagttcgggcaattttctgtttatttcctcaaacactacacaatgccatacccatctaagggttggagacatatttatagccctagaggttgcactaccacaccttctcacacacactacacaacatgattgtcctctagatgctaaagagactacaaaggacagtcaaaaagcgattgttgtcctctagatgctaaagagactacagaggacagtcaaaaagcgactgttgtcctctagatgctaaagagactacagaggacagtcaaaaagcgactgctgtcctctagatgctaaagagactacagagtacagtcaaaaaacgactgttgtcctctgatgctaaagagactacagaggacagtcaaaaaaacgactgttgtcctctagatgctcaagacttattccatcagcctccaccctaggcgtcccgccttgcgccgttgcctgtaccatgtgcggcctcgacgcctccactcgcgcctctaccggcgcggcgacgacaccgtctacctcctgctctacgtcgatgatattgtgccgacatgcaccgtcgacctcctacagcgcacgatcgtcggccctcagcggtagtttgcgacgaaggacctggggcccctccaccacttcctcggcatcaccgccgaacgctggtcccagggtctcttccttcaccagcgccagtacgccatcgacatcctggagcgggctggcatattcgactgcaagccctgctccacgcctgtcgacacttaggcgaagctctctgaggacggcggcccccggtcgccgacgcgacgtcttaccggagcctgaccggtgcgctccattacctgaccttctctaggcccgacatcgcctacaccatccagcaggtgtgcctgcatatgcacaccccgcgggagccccatctcaccgctcaagcggatcctgtgctacctccgcggctacctcgactacgacctccttctccgaccatccccgacgtcggagctcgtggtctacaccgacgctgactgggccgattgtcccgacacgcgccggtccacttccagttctgccgtgttcctgggcgccaacctcgtctcctgggctgccatgcggcagctcgtcgtctcccgctccagcgccgaggtcgagtattgcgctgtggccaatggtgtggcagaggcctcctagatgcgccagctactacacgagctccacatctctcttcagcgcacaaccctcgtctcttgcggcaatgtcagtgcggtctacctctccaccaaccccgtgcatcatcagagcacgaagcatgtggagatcgacctgcagttcgtccgcgagcgtgtcactgcctgtgacgttcgggttctcagcgtccccaccacgctgcaatacgacgacatcttcaccaaggggttaccgtcgagtgtatttttagactctcgatctagtctcaacatctgatctgtacaagatagagttgcgggggggggggggggnnnnnnnnnngcagattttaaaataaaggtgcacagatttgcttcagctctcttcgcagcctctgtgtgttcggtggttggtaatggggcaaacactctcttctggacagataaatggcttcagggccaatctttgctccagattgcccccgcgctaataaatcgggtgcccgcgaatataagacggcgcagatctgtccaagcagccttaacagccaatggttgggtgcatgatatctctggaagccttacggcgcaggtgctgtttgaatttttattggtttgggatttactccaagaggtgcaactgtaccctaatgtggaggatcaacatcggtggttgccatcctcctcggggctgtattccgccagctctgcttatttgcgcttccatggtggtgcaacaacctttgagcctgctacaagaatctggaagacttgggcccccccgcgctgcaagtatttcatttggcttgcatctctcaaccgatgttggacggctgatcgactggcacgtcatggaatggatcatccagatagttgtcccttgtgtgatcagcaggatgagtcagtgcatcacttgctggtggattgtgtttttacgagggaagtttggtttacaacactaagcaggctaggtttgcaacatcttgctcccacgtctgatgctacannnnnnnnnngggggggggggggtgttagaattccatttacggtttggggttctcctcgtgtaattactctctcacccctgtgtaatgggccatgtcctgttaactcatgtctattaatacatcacccaaccccaagatagagttagggtttcccacactgtgtaatggactaggcctaacaacctgggtctattaatacaactcccaaccctgagttagggttaggttttcccacatgtaatagaggtaggttagtttctctcccccaccccatcccaaccgcccgcttctttcccagcctccggtcgccgtcagctgcatgctctagccgttgtccgccgtgtgctcctccctgtcgtcacatcctgcagccgccgaccccgccatggatcctccccaatccgtccctcccctctccttcgcgctggatgctagcgcggacgccgggcttggtgcgacggcagccgacctcgacatgcgcgccaccgcggccctcgacgcatgcacctcgcccgcgcaccgccgcgaacgccgccgccgtgtacgccgccctaggcgtgaccccctcatcggctgatctgcacggcgccataggcgtgtgccctcccttcgctagctcgctctttccccatggctcgtcgacccgctgcgctcgctgttggcccccctacatcgacggcctcgggcccctccgcggcgcctctcctacgaccttcgctgcacaacagcgccaaggttctctgcctggcttcctcgccctcgctgctcctacatggaccgaggacgtcgcttcctcgtcaggctcctccccaacttcctcgacattggttatggatatcgccaccatccaggcggctgttgcggcctcctaggaccgtgagcgcgccacgactcttgccttggagcgcgagcgcgccatggtgccgacttgaccacccagatggccgtcgcgcaacgcctcctcctcggtcgcagtaccaccccttcaccggtggcccctgggactccccatgcccaagggcttgatgctgacaccatcattaccctccatgcttaggtcgccggggtccacaacattcggtccctcgtgtgtgttatgctggacctggcgtcctcccactaccctcggtgtcgcgcttaggtcatcctcacgcttcggtgatactcccttgttgaccatgtcctcgacgaccccgtcgttccgctgtcaccttcgtgggtacagatggacaacgtgatcctctcgtggctcaacgacaccatcaccatcgagctacaagacatcgtccgtgactaggcgaacaacgcgtaccaggcgtggctcgctctcgagggccagttcctcgggaatcgggaggctcgggcgctccatctcgacgtccagttccacctgttctctcagggggatctctctgtgggagagtactgccgccagatgaagggcatgacaaactctctccgcgacctcggcgagcccatcgccggccatatcttggtgctgaaccttctacatggcctcagcccccgctacggccacctgaaggctttcatcaagaggatcgtgccttttcccacctttcatgctgtgccgaacgagcttctcctcgagggccccgccgatcacatctacgccgcatgaagcacgtgcagcatcagcacacggagcacatggagatcgatctgcactttgtccgtgagcgggtcaccgccggtgacgttcgggttctcagcgtccccaccaagctgcagttcgccgacatcttcaccaaggggctgccgtcgagtgtcttcgccgacttccgatccagtctcaacatctgtacaagatagagactgcggggggggggggnnnnnnnnnnnnnnnnnnnnnnnnnnnnnnnnnnnnnnnnnnnnnnnnnnnnnnnnnnnnnnnnnnnnnnnnnnnnnnnnnnnnnnnnnnnnnnnnnnnnnnnnnnnnnnnnnnnnngggggggggtgttagagtactgttagggtttcggggcttgtccctgtgtaattacttgcataccctcagtgtaatgagcttggcccatatagcactcccaactcagttagggttagggtttcattctccaacagttttgttcattatgagcacattttttgtcgacttgatttgttaatagtaagttattctgtgaaggtgctaacttttgatctgtttgggtaatatgaatgatttatagttgcatacctattataattgacgctatgtaatcttaggctgctctttatcaaactgactttcgaccagttccactggaggaattcataaaagttggtaatcaaatatttgataaagacatgaacgttgttcgtgtccttcccaaagtagctgaccatggtggcaaggatccagatcatattgttgaattgtgtaatgaggtaaatctgttatttacattgcaggtcttagtttttctctgttaaacactacaattttgaagcaaattgaatattgtacttgtatttgttccaggttgttcttcagggccattctgtgcttttgttttgctccagtcgtaaaggctgcgaatcaactgcaaggcatgttgccaagttcttgaaactaccctctgttggaacaactgatgttagttcggagttttcagatgctgcagctgctattgaggccttgaggaggtgccctgctggattggatccaatattgggagaaacccttccttttggtgttgcatatcatcatgctggtcttacggtatggaagctatcttctatcttcataagatacacaaaatatcaaatatatatatatatatatttatttatttgaaatttgcactgctaaatatgtgctaagtggtgagagtggtctcactaagccaccaggtcgcgggttcaaagcaaccccttcacatttgcgggggaagggttgccttggttttatcccttccctagaacttactcacatggcctccgtcactgggtctgccctttacactgctaaatttaataaagtgatgccatttttacctaaccacagctgggcaaagggtggtaggaactgatctgccattacctgttctgattgatccaatgagcgtcatcgccttctgttctgtggcaggtcgaggagagggagattgtggaatcatgctaccgtaaaggccttgtccgtgttctgactgccacttcaactttagctgctggtgttaacttgcctgctagacgggttatattcaggcagcccaagataggtcgtgattttattgatgggactcgctatagacagatggctggtcgtgctggtcgaactggaatagacacaaaaggagaaagtgtaagctacaatatctttgttccactttattctattagagaatggttctgacatttcactagttctgttttaattgtgtttttaactttagcctaccccaactgcttgggagaaaagggctttgttgttgttgtctaataatctgacatttgaaatgcatgcagatacttgtatgcaggcctgaagaggtcaagagagttacaggtattattagaagcaattgccctcccttggagtcctgcctctcagaagataaaaatggaatgactcatgcaattatggaggttgttgctggtgggattgttcaaactgcaaatgatattcatcgttatgtgcggtgtacgctgcttaattccacaagaccttttgatgatgtcgtgaagtcagctcaagactcccttcgttggttatgccataaaagctttcttgagtggaaccatgagaccaagatatactccgctactccccttggtagagctgcttttggaagttcactcaaccctgaggaatcattggtagcatacttgtcttttgctccttcattattttattgcattgagaaagggcctctagctgagttggttaggtggtctgagtagcactccttaggttctaggtttgactttccgtgggagcgaatatcagcctgtggttacctcccatttgtctgtcccacaccaaagcacaggtctaaggtcctgtctagatcgtagtcgtttctcaaatgggctacggtgccgctgtgtatgggtggggcaggggttcgggggttttctcgacctgcgtgagaaggtcttcttaatataatacccgagggctgtcttatcccccgcaggtcgagttttttttttattttattgcattgtttaatcttgcatttttctgtttctgcactaggttgttcttgatgatctttcgagggcaagagaaggctttgttctggcatctgatttacatttagtttacttggtcacacccataaatgtagaccttgaacctgattgggaattatattacgagaaattcatgcaactttcttctcttgagcaggtatgcaagtcttcttttgtcctattgcacttgaaagttcatttatcaaactgtaaatagaatatccagaaattcgagttctatctgtactcattagaaaatagttgaaagtgaattccgaaaacatgattttagttgctgttgaactaaatgtgtgaagcaaaagtgaattcagaaaatgcaaatcaaatttgttacggttataatagtcataatattagtgtaatcttctagtctagggtttccctcatgtttctcatgtactcttatagtgcttattcatccaattcagtgcttgttaatggaatgtgtgaagtctatttcggtatttttacataaccatgaatcagactaaaacatgcatatgtttattgaactccttcgcactgtacttggttgcagtttactacatatgttatttgacctggttcataagatttttttaggagttgtcagttcttattagttttttgtaattcccatgttttctttggcccaacaagaaacagaacaactgacatgataccatgttttctgcagaacattaatcttttatcagtggtattatcattagtgccaaaatgtttataactgtatgccatgtctaccctactaaggcctaagactgtgtccaacactgttttgcactgttcacagagtggagccaaatgtgttcgcttgactttaatccgtaccggcttctattgtttctacagtatttttgtctgtatagattgcagctacagcagtccaaacagttggctttaatctgcagtagctacagacccttttggacttgcgcactgctcatgcgaaaagtggatgcgttactgttcatgtcgggtcctgggtttgttaagacagatattagattagatcgggttgacttgttggctatttctttaactctagaaaatagttaaggatcaaatctacacatctctattgggattgtatctactttgaattaagtaagaaatagatagttcaacagttcctatctggctatctacctccttaacactggctttctcgcatggccaacatgaagtatgcctgtgacaccgtatctttctgccatattggttgagaaatcaaaccattacttaaattatcaacttcagttcagttcatagaacacataatttcactcatttttttaatttctgtttgttttgttggtacaatgcagtcagtaggcaatcgggttggagtaattgaacccttcttgatgcacatggctcatggggcgtcgataccttttcgtgcaaggcctcagagaaacaccgggttaagtaacaagtctgcacaagctgctggaaatactcttgttagtgagcacacaatcagagtgtctaagcgcttttatgtggctttaatgttatcgaggcttgctcaggtataatctaagaactacttagacattgcatgttagttctatgtcaatgcatagtgctcaagatcgctagaaagcctaagtcgtgaaatgtaaaaaatagttcaatagagattagataatgaaggttgaaatgttctctcattatatatggctaattaaaatattagctcatgtcttatatttttgtagaatacacaagagagctatgtatcatttcattgagaagggtataaataaataagttacaacacacccaccacactcacacatatacacatacaaacttgtactggaaacaattcacaacacacccaacatgccttttgcatcagaacaagacccttgggtgggcatttggggaactaaaaatttgtgggtactagaaattgctacccaatttcgagtttcgacctcgaaaaagcattagccaaaattttagatacttgataatttgagttccagttttacttggtgtacctgataattccagtagcattttaaagtaagaaacaaaagtccatcaaatcatttcatatcaattaacaagaaatcaattatcaagatagtacaaatctacattgagccataccaaataatagatttacactatactgaaccactccatatcttcatattagaaaatagaagaacaaaatttttgagatattttgcgtaattcgggtataaatttacccaaactacctgaatggaattcagttttctatagctactattacgaagatggtttccatggtgacctgctagatgggctatatgggcgactcagtttgtgggaatcttatccaaggtatcaaaggtgggacgacaaccactcgaccagccgtgtttccacctgtgaattccttcacgatatgcctgccatctatggctatggcctcgcgccacctcccttttatcaaaccacgcgagcaacgtccctcccatcgggttttcaatgtttatactcgtttgtcaaaaaggaaaatgctctcttgctcagtttcttggcaacatggactttcaagaaaattttcagacacctttttggctctttctatggaagccaccgaagaatacctcaagttctatgatacaattatttcagttcaaaacaacatgcaaggcaaggataaatggatctattcttggggaaacaacaatctacgttcaagcaagatttacatattaaacttacaatccatgtacccaccttctcctttcaagtggatctagaaatccaaagtgagtaaaaagatcaaggtgctcatttggctgaccttcagagacagaatcaactcaagaaattttcttcgaagaaagatgtgtacaattacaaatgatgattacaaccatgttctttgtggccttaattgtgaggaaaccacatatcatcttttatttgaatgtccattcagtacattgtgctggaatcatgttggtattcactgggatcaccctttggatttttttgaaatgaccatatctgcgagggatcaattcagtaaaaatttcttcatggaaattctggctgttacgacctgggagattttggaagcaaagaaatgctgctatcttcatagattcctttccatcttttacgtcttggaggttttgcttcaatgacacgttggggctacaaatgcatagaatgaactcgaatcttagcttgtcgatttccttgtggcttgcttctttattttctttacttctatctccatttgcttctattcttccttccctttactgtacatttccttttttatttaatatataccactgtatgggccttccctacagtttcatcggtcaaaaaatgtccctccaatgccctccctactgccacagtctaccatgccacaggttgttgcagcactaccatgcgctcccaccatatcttgcccaatttcatgtgtatttacaagaatttactggtataagttgctgagaaagtttgggttacacagtttgacccctgagccaggacatacatccttcctagactggtgggaggagtcttctgaagaagttcatgggatggttaagaaaggtctgaactcccttatcatcttgggggcctgaatgatttggaaccattgaaaccgatgtgtctttgatggactgacttctagtctttcctcgatccttgtgtagactgatgatgagagaagggcaactttggttaaagctgtgctcactgctattcccatttatcatctaattgctttgcaatgtccaaggtgggtaatcaaggcaatagacaagattcgcaggggttttctttggaaaggaagaactgacattagaggaggacattgtgtcgttgggtggtccaaggtctgtcgtcccctctctcttggtgggttgggaattcacaatttggaagtnnnnnnnnnnnnnnnnnnnnnnnnnnnnnnnnnnnnnnnnnnnnnnnnnnnnnnnnnnnnnnnnnnnnnnnnnnnnnnnnnnnnnnnnnnnnnnnnnnnnggcccccccgcgctgcaagtatttcatttggcttgcatctctcaaccgatgttggacggctgatcgactggcacgtcatggaatggatcatccagatagttgtcccttgtgtgatcagcaggatgagtcagtgcatcacttgctggtggattgtgtttttacgagggaagtttggtttacaacactaagcaggctaggtttgcaacatcttgctcccacgtctgatgctacaaggtttcaagattggtggagtgaggcagaaagacaagtgtctaagcataagaaaaaaggtttcaactctattgtaattttagtagcttggcagatttggaagcatagaaatgcgtgtgtgtttgacaatgcttccccaaacattcacgcaattttgctgtccatccatgatgaggctttattatggggtcttggaggggctgctgctcttaggcaggtttggttgtagtttgatttttggttttttaattttcgggggtgctttcttggcacctttgtactgggtcttttctagacccttttttcttatcttcttaatatatattgatgcgtggttctcccacgtgttcgagaaaaaaagatgatgagagaagaatatgggaattagctggggccaggggtctttccttcttggcaacacctcttcttgaggtctaacccccctggctctttagtgggtagtgtgagtgtttttacatggatcctttcatttatgcgtgctgttggcctctatagggaggttttttcttgtaacccaggtcttctttagaccttcctttccctaatatatttaaagcttagttcccctgcgcttcctagaaaaaaatatctcgcccaattctcatgcaccaaattcagttcccaacatcgtcttggctgattctaggatggtttgacacattatcgctggccttggtggactacattgccgctgcccatgcagtgtcgtgcttccacaagcttgaatttcattcatacgaatgattgacgtagtgtgagtagttcttccatggctaacacaccttggaggtcgacaagtcgtatcacctattcgaacatgacacgagcacactatcgtggatcgaattcaaggacctttgcaacttgtgtttttggcccccaattcgcaacaaccgcgttgacacattggctcgtcttcgattcttgaccaagatgcaagaataccaagatcatgtcatgccaacaagcgaagttgttcgctatgggatttccaaaatatatcaatcttgacatgaaattgtgggagccccaaaatcttcatataaaatcttcatataatcctatcatgatggcacacactgaacaaccatgaccctagtgtgcgttgtggcacactgaccaaccatgaccctaatgcacaatcagcactgatgctgaactccaacgaggaccactccaatgacaagcacatggacgagcaacaactctagcgttgcacctactctgtctattaacatcaatcgagttgtctaatcatcggaaacaagggttttgtcataattgtgatgagcaatacattcatggccatcactacaagtgactcttctacactgacgttgtcaactatcaggattatattaggtggctatgttgttgtcctcagtgtggccttcctgcgcatacttgcctcgtgttctagcggtaccagtgccacgtcttatgaaggggcattaggtctacatgcgcaagaagtctagctatggttaacgactccgtcaacaccacaaactctaggttcatggaccatctcctcaacatataagttgatctttttgctgaaacaagaggactttatcggcttggcgctgccaccactgcatgcacctgctactaaggacaactctagtagatgtcaatccatacatatacccacaactctagaagaataagctccatgctcgagaacaacatccaactgagtacattagcattgttgggccttgatgcttctcatcaagaaggttggcaactcatggaggttctgctttgactacagtgtgttgaattggaagacagtgaaggataaattttcgatcctgatggtcagtgagctactcgatgagccacccaaaattctttatctagctcgacctttggtcaggctaccaccaagtccacatctaccctgacaatgcgaaatgatgtttcttacacatcatggccacttcaagtttcttgtgataccgatgagcatcgccatcgcactagccacattcaacaacctcatgagcgacatgcttcgatagttgctttgctggctcgtccttgtattttttgatgtcatcctgttatagaacatttcttggatggagcatttgcaacatgtcaaggtggtgtttgatgtgctatgtgcgaacaagttgttcatcaagtggtccaaatgccacttcggtgtgttgttcgtctcctaccttgaccatgtgatctcggtgtatggcgtggctgtggatggcgaaaaggtggaagttgtggcatcgtggccacaactgtgatccactagggaactctgttgattccaagtatcgcgggtattacaagaagtttaacaaggactttggggtcatcgtagcacctctcatgaagctcttgaatgagggtttaggtggtgccaagaagcagaagatgccatgcaggggactcaatgggctgctatcaaccgcacctatactgcagttgttggcatttgacaagctgttcacggtagactgtgatgcgtcgagttgagtgcactaaggcgccagagcattgtcattctttagtgtaggtccttcgtagctcgacatctcaaggtggtagcctacgtgtgtgatacgattggcatggtgtaggcggtacaacgttggaggcatgggcttggtgcaggcggtacaacattggagtccctacttatggggttgaagccgatatggcattggagtccctagttacggggcaccattttctgcgcttaaagttcctgctcgatcaaatacttatcaaccccaacatcaatggatcaacatgctctttgactttgatttggttgaagtgtataagtggattgcctagcttctcccatcagcttaagcttttgggttgaactggttagtgtgtccactctaacatggtatcaaagccagaggtctcgagttcgaatcctgacagagacttaatttgtgcctccacccatttatttccacgtttgcgcgtttctctttgtctgcgtttgcgcctttctctctggctacacgtgagtggggggtggtgaagtgtataagtggattgattaccttctcccattagcctaagcttttgggttgaactggttagtgcgtccactctaacatggtaacagaaccagaggtctcgagtttgaatcctggcagaggctttatttgtgtctctacccatttatttctgcgtttgctccttttccatcagcttaagttttttgcgtccactctaacatatttcatagtgaagttttgggcaagcggaacacacttgctgacaccttgtccaatctcctattgtgacattgagactgtaggcactctcaagaccctcgttctagctctataacgacatttgccacgaggtccagacacagtgagttgggcgatccttggcggatacacgatgtcctcatcctccacgacaactagatcttcctagacacatcctctagcttgttgttcacttctttggagatcgcacaagacaagtgtccataaaaacgctcaagtgcctccaagtggacttttatattgctcgaggccgcaaggtggtctgttattttgtgaaagccttttcacatgctagaggaacaaaatagaaactcttcacctgtcgggactgctctagccattgctggtgatgttgaaggtttggaagggtgactcccttgacttcatggaaggccttccaagggtgcacgagaagtgtgatcctcacagtcaccgaccatttttctaagtatgcacatttcattgccctcgttcaccacctatagattgtggcatcggttgtgaaggcgtcattcgatggtttttatggcttttctagcatccattgtaagcgaccaggaccccgtgaaaggtaacttttggctggacctcttcaagatggctggtgtgagcttcgtataagcatagctttccatctacaaactttttttttcctcgaacagcgcaggagaactgcgcgtcatttcatttaaggaagaaagtaagtacaaaggtcaagagtgacccgaaacacaaacaccaacacacacacgccatccctcaaatacaaccgtcgcgccacatcaatgaagaaggcgaccacaacctacagggctaaaaaagcaccagtaggcaccgacccaaaaacaagttcctggagtttggaagctccagccaaacaccacagccccccttccacattaacagcttttagcacttcctcaacacatggcctagaattgtcaaagacacacctgctgcggtgcttccaaatctcccaagccactaacataattagtgaattgaggcctctacgaagccccttaggaacagcagcaacagttctcttccaccaacctgggaaccgagacactagaggtggtgaatagaactattgcaatgtacttgcagtgcatcacgggagataggtcgtgcacatggctggaatgactgccatgggaagagtattgatacaatacatccttccaaatcacgctcgaagataggcgccactgcccttggtcccattcacagtgcgcaccacgcgaactcaagcagtgcagatggcgctttaggagcgtgaccggtttttggcagagctctatgaatgactggttcaagcccaatatcacgggaaacgctaatacaataagcaccatcgcaaactagagttcgagatcggctcttgggtgtggccatgaacaggttgctgaaaagtgtctctgataccaaagatgatttgtctggattgttggctttattgatacaatgacaaggaaatcatcctgaccgccctccctaggaggctctggtcataataactcacttcttgctaaacccgtaatcaacattaggtttacagataaataggcttagaggttagctgttagagaaaggtatatgctgttgcaaaagatgatgtcttgcattgagctcttagatgatttatacagagtacatggcgtaggaggtaagacaacccatggatacatatggcagtctatgaagtataatatctagactatcaaatatactctaacacatgtggcagtctactagacaatatctagactaccaaatatactctaacactaaccactcccctagaatttctcttttttcctattgttcctcctagacttccaactaagctccatgcagacaactacggaaaaactcaacaaacttgacaactaattaggcgtggctgttagccacatggtgttgtggacgctggcttgttcttcttgtggcgagtatagacttgctgataagcgtccacaacaggttgttcgtgactgctggtgtgttaactctactatgaaaatatctatgtgcagtatgaagaagctaagctatttggttcagaactgaacctgtattcagtcttagcaactctactcatcaccctcctctagttgcaacccaatagagtatttctgatatgtctttcatatcatatgcattttgtacaagcagattagattatgtccaagttgtgtattgtaatgattttaatgtaagtttgtcttgtaatatagtctttaggaattgttccttgtggtattatttattatctgtttcttcttgtcttttgtttgtttatcttttattccaagttggggtgttcccatcttgtttccttgaaaagattgtactgttctcatgtaatgcttctttcaggagattcctattgctgatgtttgtgagacatttaaggtcgccagaggtatgattcaggcactgcaggaaaatgctggcaggtttgcttcaatggtttctgcattttgtcaaaggcttggttggaatgatttagaaggccttgtttcgaaattccaaaatcgtgtctcttttggagttagggcagagattgcagaactgacatcaattccatttgtcaaggtgtgctttaattaccatgcatatatgaattatctaagtgtctctggatcttatttcagtatggtcatgtaaaatatgaaatagggttcacgtgcaagggctttgtacaagtctggtctgcgtactcctgttgccattgctgaagcatctattcctgaaattgcaaaagctctttttgaatcttctgcttggtctgggcaaggtactctttcacgtattcatggtctgattccttactactcttttttatagtacttgttttgatgaggatataaatactatagctgaaatcctgtcctgtacagtcaaggattttccttgtacttatcttgggctacctctcacaattggcaaacccacaaaggaggtcttgctgccataattgaaaaggtggcagaatttttgctgggatggaaggcttctttaatgaactgtgcaggcagattggtaatggttcgagtagtgttaactgctgctcctatttaccttttgattgccatggatctaccaaagtgggttctaaaagccatcgacaaaaggaggggtctcctctggaagggccaggaacaagctaagggaggtcactgtttggtctcttgggaaagggtgcaacagcctctggaatatggtggtcttggaattcataatctggatctgcttggctgcgcgttgcagattcgctggttgtgggctgagaaaactgatcctagtaggctttgggcaggcctccccgctcaagtccctcgcaatgcttaggccctcttcaacattgcagtggacatcattgttgggaacggtgagcaaacactcttctggacagacagatggctggatggccataccatatctgaagtggcacccagcttatttagtgctgtctcgaagcggacagccaagaggaggacggtagcccaagctctccaaaaccaaaggtgggtggatgacatcaaaggagcactcacagtccaggttatattcgagtatctaaagattgtcgcatggtggatggtctgtttttgcagcaagatgtgccggaccaattttgtgtggaaattaacacaatccgacatttacacagcatatagtgcttatttcattggcaccatcaaatttgggccatggagaagaatatggaacagttgggcacctcctcgctgtaagtttttcatttggctggtgttccataaccggtgttggacggttgatcgccttgctaagagaggcttgccccaccctgatgcgtgccagctctgtgatcaagatgatgaagacattcaccatctcttggcctgctgtgtttttgctagacaagtatgagcaagcatctttcttcagtcgggccatactgccttggcgccatatgcttcaacaatctgtttttcaaaatggtggtggacagtaatctcaactgttcctaagaaaatgcggaagggtctaaattctttgatcattttggtcgcttgggaactgtggaatcattgtaatgcttgcttgtttgagcaacataggcccaatgttcaggaagttcttagggctgttagggatgaaggtagtctctagtgcagcgctggagcaaaaaagctccaagagctaatggtcacggtgttcagtctgggggattaggagcttgttgaggttcctttccctggccgcctttcttttttctcttctgtttgggttttagcgtctccagggtgggaggcgtgatgtacagtgggtgtgggtgaggtgttcttgtatttatttttggcattcctgcctttcttctaccttaatgaaatgttgcgcagctctcttgcgttgttcgagaaaagaaaagatgcacaaattggtttctcagttacttctggatatattcagtaataagcttgcagatactttattgtttgttttaagcctactctaatgtcaatctgttgaattgactaggtgattctggtttacgacgaatgcaatttggtgtagcaaaaaaaataaaaaatggagcccgcaaaattgtcctggaggaggcagaagccgccagagtagcagcattctcagctttcaagtcacttggtgtggaagttccccagttcactgcacctccactcgcagctattgaggaatatccaactcacgataccatagaccaagctaagttaaataagctagcttctggtacccattctagagatgataaaaatatgaatacttgctctgattatgctactccaagggcttctacatacagtctaagaaaggacacaagtcctgctccttccattcaaatgaaagagaatgcaggactatctaaaaatgtgcaaatcactagacagggagcatcatcatctttgtcaacagaaattgctgatggatctagtagagatgtggctgaaaaaggtcctgtccatgcatataacttcccagggggatttgattgttttcttgatcaatggtccacagctagtaattttttctttgatgttcattttatcaagagatcgatgaaaccatctttgaacctttttgaagtttttgggttggctgtctgttgggaaaaatctcccatatactactgcaacttcccaaaagatctagtcactactggcaacaataacatcaaggaaatgtggggtaattttcagagaagatgggaaaaaatagcggacattatgaaacaaaagagtgtccaaaaaatgacatggaatttaaagatccagatccaggcacttaaatcaccttatatttcttgccaacggcttgaaaggtttcatcttgaccataaaatgctggacaaagttgaagtgcttaacaactcatatatgttgttatcaccagtctctgtctacaatggattggatatatgtctgctggcgtgggttctatggccagatgaggaaagcagagcggttccaaatcttgagaaggtatttgatatatgtcgtgttctgcaatatctttagcttttcgttgctgatgcattgtcacttcatgtacattttttatattcgtttttttctgaactttgcaaaagcaatatgagtaggaattttagttgataagagcctcaagaaccgtgtgttggatatgaaaatgcaaggaaataggattattcatatagggcatgatgagaatgctaagagactttttaggaagacttagatgtcatgtttacaactatacctatcagtaagaaacttttcataggagatctcaatgggcatgtaagtacaacaagtgtaggttttgaggtgtttcatagaggcttccccaagcttcacgtctcagacaatgtttcttgaccaagtgggtttggctatgacatgaagctaagaaacattgtctggtcatgtccactttggagcgtaccgctcgtttacgctctcgaatctgcttccttaaagatggtgataccaattccatagctatgttttctggtcgcccgaccagctagtcgaactgggggatcgaccagcgactaatctcgattagtcgtcgactaggtccgactaatcgagctctggtcgacctggtcgtcctgttcatccaggagaccaggacctatgtatatactatataatatatactattatactatatagtaaataattatataactatatagtatatatgaacttcatatactatattatgaaggatagggtaaacatgacatgaattcagcaatactgaaaagtgaaaacagcatagaaacacttctagttattaatactacaagtcccagataccagtaccacacaacacacattaatactacaagtccaaaaaaaaatctaggtcctaaacctagtcgcccagaaccggctaatcgagcgactaatcggccctaatcgtcgactagtcggacgaccagggcgaccaggtactctagtcgagtcgactgcctaatcgagctctgctaaccgactagcccgactaatcgcgactaatcgcgattagtcggacgacttgaaaacacagttccataggcatgccagtttccggaaacaaaagaactttattgggaagttggtggttgatgatcagattttcacctcgcaagatgagaaacagaagcttgatggtatcttaattgcggatgcaagaggagacttatctttcagttatatcttttggtcgaacaatgtgcttgacaagtggagtatagtggtactaatctacacgagtaagggaaatatttaaagttgtatcaattaccaagtaattaagttgatgaaccatactatgaagctatgtgagagagttatcgagcattgtttgagaggaataatgaggatctctatgaaccaatttggtttcatgtccgaaaggtcaaccatggaagttattttcttaataagacaagggatgaagcagacagggagcagaaggacctacacatggttttgttgacttggagaagacttatgacaatatactaagaaatgtcatgtgttggtttttggacaaacataaaatctcaaggaagtatgttgtagtcattaaagacatgtgttcgaacaagggatggagacacaaataacttttcgattagaatatgactacatcaagggctggctttgagcccttatctttttgccttggcgatggatgaggtcacaagagacatacaaggggataccccttggtgtatggtttttgcgcacaatgtaatgctagttgatgaaagccgagcaagagtaaatagaaaactagagttgtgatggaagactctagagtctaaaggtttagactcaatagaacttaaactagagtatatgagatatgacttcgacactactgcacatgactacatacggaaagagatcttagtttggaagtttaagtagtgcttaggaaggatatcttttagtatttagaatcaatgctatagaatgacagggtattgatgaaaatgttagccatagaatcaaagtagggtggatgaagtagtgtcaaccatatgatgttctatgtgacaagagtgtaccacagatgctaaaagacaagttttaccaaacgatgattatacctgctatgtagtatggtgtagaatgttggcctataaaaacacattttcaatagacaagaagggattgagttcgaatcatggaatggtgatacacatgataagctaggggtagcaccaattgaagaaaatcttgtctaacacctgttgagatggtttgtaccatggtttttaaagcggtaaggcgctccaaggcgttggaccaccgcctagacgcctaggcggcgcctaggcgacgcctaggcgaggtaggcgggcaaggcgcctaggcgtcagaccaccgcccggacgcctaggcgtcgcctaggcgacgcctaggcgacgccttaaaaacagtggtttgtacatgtccaacagagaactccattagcaccattgtgtagtgacgcgctaataatgggaagagagatggagaaaggctaaagttaatatggaaagaggcattaaaaggagtcaaagatttagtcttgaataagagtgcatggaaaatagctatccatgtgcctgaaacttgacttatggtttatgttgggtttcaacgctagcctatcctaacttgtttgggattaaaaggatttgttgtttcttgaatacgcaggaggtctgcgtatttttatattaagaagaaaaaaggggggggggaccccaaaacagaaacaacagttttacaaactcacaccaccattaacgcctaagacaactcctctaaaaggatttgttgttgtttgcaatagcaatacacagctgttaattttgatgctgacctatttctgataatatattacttttgcattttactttgtgataaacagtttgtcaagaggcgacttcatagtcaagaagccgctgctgcaaatcgcgatggaagatggagaaatcagatgcacaaagcagcacacaatggctgctgtagacgtgctgcacagacacgggctttgtatactgttctgaagaaattacttactcaaaatctttctgttttggttgaaacaatcgaggccccattggtacaacacctattcttacttaatactctctccagttataacaaaagtgtcattttgggttgcctgcagttaatttgtttatactttgatgctttggattgaatatctgaaaataacgcaactagattcttcctggaaagtagttcaaaatataacaactttgttatagtttcatacattttgtagcaatcgaatcatcctattagtacccatgttggtatccaaaattacacttgtgatcggaatacaatattgctgcttgtattatgcttggatatctcttatgcatttattttgacaggttaatgttcttgctgatatggagctttggggaattggcgctgacatggatgcttgtctccgtgcgaggcatattataacaaaaaagctgaaggaactagagaaagaagcttacagattggcaggcaagaatttctctctaaatgctactgctgatatcgcagacattctatatacacacctaaaattgccagttccaaaaggctgtgagaaagggaagctgcatcctagcactgacaagcagtctttggaccacctaaggtattttttcattttccttgttagttctgacatcaaacatgttatttctagttctttggaagtacttgtgtgccactttatgtccgtgcattatggatggaaaattttaaatgtgttagcatatctagtgtctagtcactgatggtctattggtagttttgtgtgagtaaaggtaaattattatgttgtcttgatcagagctagaaaagtgcttgtggaccaccggccacatgttattggcagttaatctctggacatgcttttagaatatcattgtgctaatatgcactctttttctgttttttttggagtcaattaacaggattaactcatttttcatccctaattaaatacacgcatgcatgttcaaataatatcttcaatttggaaaagcttatgccaaagagaagcacatgtatcactgctttactgtattttcagtatataggctgctgctgatgtccttattgtatgcactcggaagatcggtagcaaggcaacactacaacagccttgccaagctggtcttcctttcgtttgaaatctatggcactcttttgatttcacttggccccaaattttcctcgacataaaattgccgtggctttatagtttactataaaatccttatcaactggacataatgctctctttaggcttctattaattatcccagtaatgtaggagaatttaatttgaccattttgctaaaatatttttgaattcttctgtttcctcagggatcaacaccccattatcccattaattaaggaacacagaacattagcaaaactgttaaatggcacgttgtggtccatttgttcacgtgctcaattgtgcactcaatcacaaaggtacatcatacatggaaattggcttcagacgtcaactgccactggccgtttgtccatggaggagccaaatctgcaggtcctttagttgtaataaatgctttgcatgttttgtttggatttcagttattgagaaataacctactgacttaacctgttactatgtagtgtgttgagcatgtggtggaattcgatacagggaaaagcgataaagattactcaagcatgtcagttgatgatcatcataaaatcaatgcccgtgattttttcatacctaccaaggtttttctcatttcacttttatgtatttattaagttttccctttaattaggacagttgactattttcctgtaacaacgctttatttaatatcatgatttacttattttgtaggagaactggttattcataactgctgattactcacagattgagttgcgtttaatggctcacttttctaaagatcatatgttggttgaacttctaaagaaacctgatggtgacgtttttaccatgattgcttcaagatgggctgagaaagaagaggccttgatttcttccaaagagagagaaaacactaaaagattcatatatggcatcctttatggaatgggtgcaaactcccttgcagaacaacttcagtgcagcactgaggaagctgcacagaaaattcaaagctttaggagattttttcctggtgtttcctcatggttacatgaagttgtgttatcctgtcgccaaaaagggttagtctacttggtagcaatttctgtttagtctttctttttatataatattgctcctttgatttttgatgctaacattgaatgagctctgtgaaaaatatgttagtcttaacttttgtggtatttcatatctgaacttttgagatatttcatatttgagcatgtattatcatatctttcaatgttagtatgcgagctgcttctcataataatttaaggtgaatatgcttcatgataatttgattttatttgaatgttaagtttatacagtaaatgataaggattactgtcttttggtcatgttatttatataacgactacttaagatcagagctcctttatctgttgggttgacatatgcacttgtagcccatattgctcatgagattgtatatatattgtcgtatccactactagcggtcttacgaaaccccaaggttactaaagccatggattagagtttgggataactttcaaatgcactcatgattcaattttctttttacctggtttgtgccgatcagaattaatgtctgcgcccttcttcagtttgttgtggcctaacttgtgaaacccttgctatctcacaacttccatctgttagacaatttattttcttccctagttacgaggatttcttctctgattatgtgccagcagttgtttcctccgtacgtagctgtccttgattaggtgtggacaattggttccttcctccctggctgtttccttttagcgcccagatcatctccccgattattgtttccatgaaatcaggtggagcacgttctggtagaggcctattgttctcctgctatttagttgaatataagcaacatttcgcgctattatggcatcaagagattgttacgatcccgtgagaactcgcttttggtaatacttgcttgcccacgtcgcctccccgatgttgtgccgtcatgccacctagtgaccctctgcccgttttccggtgaccaacaacataccgaggatgcagccacataggagaaggcctgctagatccttatcgttgctgccgatgaggctgtcaaggccgtcactgccgcctaggatcatggccgcacaacccaggacgctctcgcgagggaacgctaggctgctaccggtctcaagcgtgctaaggccgctgctcgtgacgctgccttccctcctctcaacgacgaccctgatgatgacgccgacgctagtgaagacttcaattatgaggccgctaccgcctccaacctccacgtggaggccgtgggcgtacagaacctccatgcccttgtgcctgtggttctggacatcctctccacccactacagtcgctgcgggatctcgtcctcctcgccctcgagcggtatgccgtcgccgaccatgtcctcttcgacgccctatttgtgccatcctatcgacgcatggacatcgtcgtcttgtcatgggtgttgtgcacgctctccctgagtttgagttcgctcgcacccccggcggcacaacacaccacacctggatcgttgttgaggagcaattcctcggtaatcgtgaagctcgcgcccttcatcttgacgccaaattctatgtctttatgcatggtgacctctctgtcggtgactactgccacaagataaatgggatggctgacgctctcggtgatctcggagtggttgttcgtggccgcatcctcattctcaacgtgctacacagcttgaacgagaaattaaaccacatgaaggtccactttcatgcactccaagctgctaccttccttcgtctgcaacgacctcatcctcgaggagattgactacaacgcatcaacaccgccaccagcagccgcccttgttgctgtgcatggcctttcggtagctctgcttcccctagcgtcccctcttctgggggcttagctgcgcccctgtcccacccacggcgccctccggtagcatctccactggtgccgacagctattagtagctaccgtcgtcgttgcgacaacggtggcgttgaaggcaaggccatggttccctagcctttgatctacaactcgtggaccgagttagtcaccatgtggcctggccccacatgtgggccacaagaccgtggtggccaaacgccgcgcgcgcccatgcctcaggccacgcaacaacagttgacaacaacatgactagttcgtggtcatgtcgtttggcttgaggaatgcgttaacatcattctagtcccccttgagaattgaatagcactcctagctgacaccatggactcatcgcactcttcatgggttgcttggcctcacgggcttctaccgcttcttcatcaacaactacgacatcatcaccacaccatgaacatccctcaagcgtgttgccttccagtgtgctgatgtggcgactacatcctttgaggccttcaaggcggccctcacctatggactggtgctgcagttgttgagcatcacggcttcgtccatcatcgattgcgattcttcgggcattggttttggcgtgctcttgcccgatcgccttgtttagtctgtggatggagccccagcctaccaaacttgccacctaagagcgcgagctcattggccttgtgaaggctgtgcggcactagaggtcgtatgtctgggaccggccagtggagatagaagattgggtccctaatgatttctcccctactagaatactgcaacagaacctttgaatcttttagtcctgaacaagttgtgcaggctagtttcgaaatgcaacaagggaccacaatatcgatgatacagctaggcatacatcaaagaagtttctaattcgttatcactcctcagatttgttgagactttattaggccggcgacgtgttcttacaaaaataacggctggcaatagcaaagagaaagctaaagcacagaggcaagcagtaaattctatttgccaggtaatatagcattctcacatagttttagatggttgattttattgattatatgattaatatgcatgtgtttccagggttctgctgctgatattattaaggtggctatggttagagttcattcaataattactaacagaactagtgcaactgattccacagatgaagttacaaggaaattttcagaacttggtggccagtgtcaccttattttgcaggtgttttaagacttgcattgcatgatacttattttcttttgacttttgctcagtttggctctaaatatggatgaatgcaactatatatttttcatttgtaggtgcatgatgagttggtattagaagttgatccgtgcatggtagcacaggctggaaggttgttacagatatgtatggaagaagcagcttcactattgggtatcagttttaatctaaacttcgatagttatcttatgttcagtctttgggagcatcttgaaaaggtctttaaaatttacctgctaaactaatagttatgccaagtgaacaaaatgaataggaagttctatttctgccgttctccaatagttaggttcttaaaactaacaacctgggcaggagggtatggggggagcacgcaaaaactgcggaggaggaggcacaaatagtagatatgacnnnnnnnnnnnnnnnnnnnnnnnnnnnnnnnnnnnnnnnnnnnnnnnnnnnnnnnnnnnnnnnnnnnnnnnnnnnnnnnnnnnnnnnnnnnnnnnnnnnnnnnnnnnnnnnnnnnnnnnnnnnnnnnnnnnnnnnnnnnnnnnnnnnnnnnnnnnnnnnnnnnnnnnnnnnnnnnnnnnnnnnnnnnnnnnnnnnnnnnnnnnnnnnnnnnnnnnnnnnnnnnnnnnnnnnnnnnnnnnnnnnnnnnnnnnnnnnnnnnnnnnnnnnnnnnnnnnnnnnnnnnnnnnnnnnnnnnnnnnnnnnnnnnnnnnnnnnnnnnnnnnnnnnnnnnnnnnnnnnnnnnnnnnnnnnnnnnnnnnnnnnnnnnnnnnnnnnnnnnnnnnnnnnnnnnnnnnnnnnnnnnnnnnnnnnnnnnnnnnnnnnnnnnnnnnnnnnnnnnnnnnnnnncccccccccccccccaaaaaaaaaccaaaaaaagggagctgttctaagaagcccatggagatgctctaaccaaggtaaaactgaattggtgtttgcttttatttcagtacctttgcgcacaaagataaaggtgggaaaaacttggggttcactagaaccattctatcctgagccttgttgatgcaaatggttaatgtcagttggatgccaatgtttcacgacatgcaaggtcctggaagaaggctgaacaatttccaatatgccccacagggaccttggtaaatcctactcttttttatagaagattcaccccctgcagagttaatctcatgaggcctgctatttgccactatcgtttcttgttctgcattgtccatgtatttaactgatgcataccttgaaccatatatgaccatatatccgtgtgtggctttgctaatcttgtattttgaatttagtttacattttcatcttcacggtctctttgaaacttcaaatgaatcaggtgattctgtctggtgttcttcggtagaaccttcattgctatgtctacagtcttctgtcattgctgaccgtatgtgaaatcaacgcaacagcgaccagctccattactgaggatttgctatggactggtgattatcattatgattccatgtggcatgcaagaagcatatatatatatatcaccaatagatgctgttaaagggtttaaggtgtatttgaaaggtcttcctagttatactgcgaatcttttagataaacccttaagaaattggagggcctagtatatggtgatttttcttttgctaggtccagcgctaaaaaaccgattatggggtttattcaaagatgaaatttcatcctgtaactacaggttcaaggtgtatttggtttgatggatatcactatggacaagcgatggttggtttttgtacaagttggatgttgataaaaatgttggtatccatgccacacaaaaaaagcctaaccagcacccatattttgtaatccttgtcaagtatgttatatggtttacttgatagctctagcgaggctatccagtacctcaccttcaccctcatatttgtaatccttgtccacataattattagtatgttatatggttatttagtaattacgatggaaatatta

SEQ ID NO: 22 - DNA, 72885 bp, Artificial Sequence
  genomic DNA of mutant pol theta (c->t at position 85)
  misc_feature (5583)..(5733): n is a, c, g, or t
  misc_feature (31155)..(31650): n is a, c, g, or t
  misc_feature (44470)..(44479): n is a, c, g, or t
  misc_feature (45143)..(45152): n is a, c, g, or t
  misc_feature (46993)..(47109): n is a, c, g, or t
  misc_feature (53299)..(53398): n is a, c, g, or t
  misc_feature (71287)..(71733): n is a, c, g, or t
gcccagcaattcaaaagaaaccgaacacccttccggaaattccctctggcaatggcgtcgggctcgtctcgcccccaaatcgactaggtaaaaccctaacctagttcctcgcctattcacttcgtcgcctccaagcgctaattcttcctgcgttccggctccatctcagttcttcccggccaagaagcggaggccctcgtcgcggaagggcgagtcgccgcgacccgggacgcagcatgagagccccggcggcgccaaggggtccctggaagggtacctcgtccgttcgccttgcaaccgtgccgtggcagcggcatcggtggtccccgtgggctcgcccaggggcggggacccgggcgccaggcgtagcctctcggccgcaatggatgtcgacgtcggttcctcggcttcggtggctgcggcggcaggtgacggggcagactttgatctcaggaggagcacggcggatttcttgtcccattcctgcaggtgagcgcgcacagtgtgaaacataaggggagttatagtattggttccaataactgttattttgcaagttacgggtctaattttgttgttccagtgctatcctgcctttgaggggtgactgtgattacagcgagcagtgccagatgaagcagaagcggagtgcgtcccagtcattcttggttccttgtgacaacgactatgtcaagaagcagcgagttgcccattgtggtggctttgaagctctaaaggttggatcaagatacactatccatccatctttagcatcgtcatatgataagtgatttcatgagtttcaactcttagtttggttctttgcaggagttagatgataatgtagcttccatgaagcaatgcatcaatcaccatggtggctcagaggctgtggaggtttagttatgcctgaacaagtcaaacctggaaccgtttctttgttttcctcttttccttttgaacttctcattatttccttttcatcaggaatctgttgagggggaacatgtgagttgtgttgggttttcggccttgcaaagatgtagctttaccccaagtactgcacagataaaagttgggttttctctagcacctgtggaaaccctaaagtctgtatcgaggaattcccttacttcacctggtgaggagttctggaatgcagcaattgaactcgctgatgggatatctgcccaggctgataaggtccgtggaaggccagaatttgatgcagcagaagacaagtcatcttgtgcagtagcagcattctttaagactcttcctagatcaggaagggatgagcttgactgtcaaaacacagtaggcagcaatgatacacatcatatagagaaattgtcaaataaagttgaatcactggcagtaaactgtcagcatataattagctcacctttgcctgtgaagcagctagatttctttcatgaggatgatattaaagtttcaggttcaaaatttgaaacaaaaggcagctatgaaacttgtaatgcacaagcagaccgtgttccactgaaaggcagtggccgcctagaaaaggaaaatctcatggaccctgtggatgtgatgaagagaagtgctattaatttgcacactgattctgcagccatgagatgtcagggtgttttcaagtcaacaactgaagggaaggttcatccaactcaagaggctggaagagattctaatcttattaggagagatctcaatcagccaacccacaatgaaaataaatcacttgctgcatattcaaataatcgcaagacttggatagattccaagagtaaagttgcttctcaggaagtggaagctagcacacctactagctccattcctctaaaggatcactcaaagatatcaagttggcttcctcctgacctttgtgctatatacatgaaaaaaggcatttcagagctgtacccttggcaggttaaggttcttttctctaattatctatttaatgaatctctggcagctagccttctttcgtctggccatttttgcctatgtatttttttctccagccatgcaaactaccactgccctctctactagtaggattaccaattatttttgctcgtaagctaagcttctttagtatttgtatcgtaataagtatgtcttgaaaactagtacttagtatatcaagtgctgagatggtttgtacatgtccaatagagaccttttagaggcaccagtgcatattagtattataaaacattaaaacgtgatagtaatgggaagaggtagggaaaggccaaacttgatatggaaagatgcaataaaaggagacttaaaatgatgaaatatatctaaagatttagtcttcaatatgattatgagtgcatggaaaacaactattcacgtgcctaaccttgatttgtggcttgtgttgggtttcaactctagtctacactcacttgcttggtactaaaaggctttgttgttattgttgattcatataaaatgctaagtcttctcttgtattgctgtcatcacattcttttcacgtttttaatgcgtttttgcttcatttttctcgaatattgtaatgctctcctagatctgtctgaaggcatgtttggtttgtgcccccactatgctaaaccaaatttggcaatagaagaaaccatgacatggccttttgtaacaccccgtccaatccctggaccggcggtacttactcctggtagctctctagaatcatatattgtccccacagaccaacacaagtcttttatgcgcactttgtcctcactcatgcgcacccgagaaaacttcccagtcggtcacccatcccaaattgctccaagccaagcacgcttaacttggaggttcttttgagataggcttcctaaaaagaagatgcaccttgttgatatggttactctattaattctattaagccttgggccaggatatcccatcccaggggccaggatatcacaattcaccccccttagaagaccgatgtcctcgtcggtcaaccccaatccaggaacctcccctcttagccacgtctgtgtgtctagtgtcgtcatatgccatgccatgtgaccactctgggcccacatgcgccatgcgccatatacccaaaccacctagcccacacacgcccgtgaaacatcgagggtcggctctgataccacttgtaacaccccgtccaatccttagaccggcggtacttactcctggtagctctctagaatcatatattgtccccacagaccaacacaagtcttttatgcgcactttgtcctcactcatgcgcacccgagaaaacttcccagtcggtcacccatcccaaattgctccaagccaaacacgcttaacttggaggttctttcgagatagacttcctaaaaagaagatacaccttgttgatatggttactctattaattctattaagccttgggccaggatatcccatcccaggggccaggatatcacacctttaggcaggtacaagatttgaattggattattggagccaaataaatttacataaatatctacctaactaaaaggaacaatgtttcttgttgccccttccacccaatgataggtggacccaaggtaatcctgcgtctcttatgtcaggtcagcactctctcgctaagagccatttgttcatgattgaatagccaagtgagatggccaccatcctcgaggtcatgttttcggacctaggatgtcaggccgaatgtgttctggttcttggagttgtattttgtttcttttaatataagccgttcggttgcataggccaaaagagcagtttgaggccaaatgaaattttagcggcgagagctgtctcactgagttgtgagtttgaagcagtctttccgcatttgcgcggggggggggtgatggaataagtcttgagcatctagaggacagcctgcttttgactgtcctctgtagtcctttagcatctagaggacaacagtcgctttttgactgtcctctgtagtctctttagcatctagaggacaacaatcgcttttgactgtcctctgtagtcgctttagcatctagaggacagcagtcgctttttgactgtcctctgtagtctctttagcatctagaggacaatcctgttgtgtagtgtgtgtgagaaggtgtggtagtgcagcccctagggctataaatatgtgtccccaacctctctaagggtatgacattgtgtagtgtttgaggaaataaacagaaaattgccccaactcatagtgtcatcctcttgatgagagttagagtccctctacttacaattggtatcagagccaaactatcctgcagcctaaacatatcgtgctcatctccttctcgcgtctctccccacactcagtcggcagcaagagctccaactgttccttcctcccctgctcagacgagcagcctttcgtctgagacagcctcttccacacgcagcaacccctcactagcccaccatgtccctacgctcggccacttcgagtgcgcggcgccagcaggaggccgaggtcgccgcggcacaagaacgcgagcgagcagcagcagcggctgcagcgacagcggcgagggcagcacggttggcggcggcggaactggcagcggcgagagcggaagtagaagcagcggaggcggcggatgctgcacgtgcggcggcaacagagctcgaggttctgcgcggcagtagagctggcagctctgcttctgtcgacgacaacaccgacgaagagctcaggctggcgagggaagcagcgcgagagcaggcggcatagtgggcagccgcgcatccccatgggggcgcgcgtggcggcagcccggatacgcgctgacggcgctctaggcggaggcgcacgcggcggcagcccagacgggcgtagacgcgccggcggtgctcccggcggcggcgaccgagtcgacggagatcgcggcctctacaggcggcgcggttctccctccccggatcggtaccatggtcgccgcatggcccaggccattgtcagggacatcggtcccggcggtggggggcctaccctcaccaagaccaactacgtcgagtgggccgcggtgatgagggtacggctccaggttcgccacatgtgggaagcagttcgttacgacgacgtcgactaccacgaggatcggcgggcgctggatgctctcattgctgtagtcccgcccgagatgcagttttcgctttcccagaagcggactgccaaggaggcctgggacgccatcgctgcgacccgcatcggcagcgatcgtgcccgcaagaccacactgcaggcacttcgcaaggagtgggagaacctggccttcaagccaggtgaggatgttgatgactttgctctccgcctcaacactctgttgcagaagatggtgcagttcggcgacgacacctacgatgaggagagagctgttgagaagctcttccgttgcatccccgagaagtacaggcagattgctcgctcgatcgagtctctgctagacctctccacgatgacgatcgaagaggcgattggtcgcctcaaggtggtggatggcgacgaaccacaggctctctctgggcctatcactatcggcgggnnnnnnnnnnnnnnnnnnnnnnnnnnnnnnnnnnnnnnnnnnnnnnnnnnnnnnnnnnnnnnnnnnnnnnnnnnnnnnnnnnnnnnnnnnnnnnnnnnnnnnnnnnnnnnnnnnnnnnnnnnnnnnnnnnnnnnnnnnnnnnnnnnnnnnncagggtgacaagaagaagggggagtcctcctcctcgacacgaggccgcaaacgcggcaagccgcgcaagccgcgtggaggcgcccaggccggggcgcgaggacatgctgagggtggtgcacgtggaggtgcccaaggcggcgccgtcggcaacaagaagccggcacgcgacgacggctgccacaactgcggcaagcttggccactgggccagggattgtcggcagccacgacgtggccaggccaacgtcgcacaagcagaggcggaggaggaggccctgctcctggcacatgcaagcatcgagccatctccagcggcaccggccgcagcggcactcctccaccttgatgagtcgaaagcacgcgctttcctcggcgacggctccaacaaggacatgatcgaaggatggtgcctcgacaccggcgccactcatcacatgaccggccgacgggagttcttcaccgagcttgactctagcgtccgaggctccgtcaagtttggggacgcctccggtgtagagatcaagggcgccggctcagtcgtcttcaccgccacgtctggtgagcacaggctgctcaccggagtctactacatccccgcgttgagaaactctatcatcagtttgggacagctggatgagaacggttcgcgcgtggaggtcgagcacggagtcatgaggatctgggatccctctcgtcgccttcttgccaaggtacgcaggagtgcaaatcggctttacatcctcaatgtgaaggtggcacaaccttgctgccttgctgctcgtcgagacgacggggcatggcagtggcacgagcgcttcgggcaccttaacttcgaagccttgaagcggctcagcgccaaggagatggtacgaggcctgccgtgccttgaccatgtggagcaattctgcgatgtctgcgtgttgacaaagtagagactgctccccttcccccagcagtcgagcttccgagccaaggagaggctcgagctcgtgcatggggacttgtgtggcccggtgacaccagccacaccaggaggacgacgctacttcttgctgctcgtcgacgatctctcccgctacatgtgggtgatgatccttggcagaaagggagaggctgcgaacgccatcaggcgtgtgcaggtcgctgcggaggcggagtgcggccgcaagctgtgatggaataagtcttgagcatctagaggacagcctgcttttgactgtcctctgtagtcctttagcatctagaggacagcttgactgtcctctgtagtctctttagcatctagaggacagcagtcgctttttgactgtcctctgtagtcgctttagcatctagaggacagcagtcgcttttgactgtcctctgtagtctctttagcatctagaggacaatcctgttgtatagtgtgtgtgagaaggtgtggtagtgcagcccctagggctataaatatgtgtccccaacccctctaagggtatggcattgtgtagtgtttgaggaaataaacagaaaattgccccaactcatagtgtcatcctcttgatgagagttagagtccctctacttacaattggtatcagagccaaactatcctgcagcctaaacatctcgtgttcatctccttcccgcgcctctccccacactcagtcggcagcaagagctccaactgttcctccctcccctgctcagacgagcagcctttcgtctgagacagcctcttccacacgcagcgacccctcactagcccgccatgtccctacgctcggccacttcgagtgcgcggcgccagcaggaggccgaggtcgccgcggcacaagaacgcgagcgagcagcagcagcggctgcagcgacagcgacgagggcagcacggttggcggcggcggaactggcagcggcgagagcggaagtagaagcagcggaggcggcggatgctgcacgtgcggcggcaacagagctcgaggttctgcgcggcagtagagctggcagctctgcttctgtcgacgacaacaccgacgacgagctcaggctggcgagggaagcagcgcgagagcaggcggcacagtgggcagccgcgcatccccatgggggcgcgcgtggcggcagcccggataggcgccgacacgctgacggcgctccaggcgggggcgcacgcggcggcagcccagacgggcgtagacgcgccgacggtgctcccggcggcggcgaccgagtcgacggagatcgcggcctctacaggcggcgcggttctccctccccggatcggtaccatggtcgtcgcatggcccaagccattgtcagggacatcggtcccgacggtgggtggcctaccctcaccaagaccaactacgtcgagtgggccgcggtgatgagggtacggctccaggttcgccacatgtgggaagcagttcgttacgacgacgtcgactaccacgaggatcggcgggcgctggatgctctcattgctgcagtcccgcccgagatgcagttttcgctttcccagaagcggactgccaaggaggcctgggacgccatcgctgcgacccgcatcggcagcgatcgtgcccgcaagaccacactgcaggcacttcgcaaggagtgggagaacctggctttcatgccaggtgaggatgttgatgactttgctctccgcctcaacactctgttgcagaagatggtgcagttcggcgacgacacctacgatgaggagagagctgttgagaagctcttccgttgcatccccgagaagtacaggcagattgctcgctcgatcgagtctctgctagacctctccacgatgacgatcgaagaggcgattggtcgcctcaaggtggtcgacggcgacgaaccacaggctctctctgggcctatcactatcggcgggaagctacatctcactcgggagcagtgggaggcctgccagggtgacaagaaggagtcctcctcgacacgaggccgcaaacgcggcaagccgcgcaaggcgcgtggaggcgcccaggccggggcgcgaggacatgctgagggtggtgcacgtggaggtgcccaaggcggcgccgtcggcaacaagaagccgacacgagacgacggctgccacaactgcggcaagcttggccactgggccagggattgtcggcagccacgacgtggccaggccaacgacgcacaggcggaggcggaggaggaggccctgctcctggcacatgcaagcatcgagccatctccagcggcaccggccgcagcggcactcctccaccttgatgagtcgaaagcacgcgctttcctcggcgacggctccaacaaggacatgatcgaaggatggtgcctcgacaccggcgccactcatcacatgaccggccgacgggagttcttcaccgagcttgactctagcgtccgaggctccgtcaagtttggggacgcctccggtgtagagatcaagggcgccggctcagtcgtcttcaccgccacgtctggtgagcacaggctgctcaccggagtctactacatccccgcgttgagaaactctatcatcagtttgggacagctggatgagaacggttcgcgcgtggaggtcgagcacggagtcatgaggatctgggatccctctcgtcgccttcttgccaaggtacgcaggagtgcaaatcggctttacatcctcaatgtgaaggtggcacaaccttgctgccttgctgctcgtcgagacgacggggcatggcagtggcacgagcgcttcgggcaccttaacttcgaagccttgaagcggctcagcgccaaggagatggtacgaggcctgccgtgccttgaccatgtggagcaattctgcgatgtctgcgtgttgacaaagtagagactgctccccttcccccagcagtcgagcttccgagccaaggagaggctcgagctcgtgcatggggacttgtgtggcccggtgacaccagccacaccaggaggacgacgctacttcttgctgctcgtcgacgatctctcccgctacatgtgggtgatgatccttggcagaaagggagaggctgcgaacgccatcaggcgtgtgcaggtcgctgcggaggcggagtgcggccgcaagctgtgatggaataagtcttgagcatctagaggacagcctgcttttgactgtcctctgtagtcctttagcatctagaggacagcttgactgtcctctgtagtctctttagcatctagaggacagcagtcgctttttgactgtcctctgtagtcgctttagcatctagaggacagcagtcgcttttgactgtcctctgtagtctctttagcatctagaggacaatcctgttgtatagtgtgtgtgagaaggtgtggtagtgcagcccctagggctataaatatgtgtccccaacccctctaagggtatggcattgtgtagtgtttgaggaaataaacagaaaattgccccaactcatagtgtcatcctcttgatgagagttagagtccctctacttacaattggtatcagagccaaactatcctgcagcctaaacatctcgtgttcatctccttcccgcgcctctccccacactcagtcggcagcaagagctccaactgttcctccctcccctgctcagacgagcagcctttcgtctgagacagcctcttccacacgcagcgacccctcactagcccgccatgtccctacgctcggccacttcgagtgcgcggcgccagcaggaggccgaggtcgccgcggcacaagaacgcgagcgagcagcagcagcggctgcagcgacagcgacgagggcagcacggttggcggcggcggaactggcagcggcgagagcggaagtagaagcagcggaggcggcggatgctgcacgtgcggcggcaacagagcttgaggttctgcgcggcagtagagctggcagctctgcttctgtcgacgacaacaccgacgaagagctcaggctggcgagggaagcagcgcgagagcaggcggcacagtgggcagtcgcgcatccccatgggggcgcgcgtggcggcagcccggataggcgtcgacacgctgacggcgctccaggcgggggcgcacgcggcggcagcccagacgggcgtagacgcgccggcggtgctcccggcggcggcgaccgagttgacggagatcgcggcctctacaggcggcgcggttctccctccccggatcggtaccatggtcgtcgcatggcccaagccattgtcagggacatcggtcccggcggtgggtggcctaccctcaccaagaccaactacgtcgagtgggccgtggtgatgagggtacggctccaggttcgccacatgtgggaagcagttcgttacgacgacgtcgactaccacgaggatcggcgggcgctggatgcccccattgctgcagtcccgcccgagatgcagttttcgctttcccagaagcggactgccaaggaggcctgggacgccatcgctgcgacccgcatcggcagcgatcgtgcccgcaagaccacactgcaggcacttcgcaaggagtgggagaacatgaccttcaagccaggtgaggatgttgatgactttgctctccgcctcaacactctgttgcagaagatggtgcagttcggcgacgacacctacgatgaggagagagctgttgagaagctcttccgttgcatccccgagaagtacaggcagattgctcgctcgatcgagtctctgctagacctctccacgatgacgatcgaagaggcgattggtcgcctcaaggtggtcgacggcgacgaaccacaggctctctctgggcctatccctatcggcgggaagctacatctcactcgggagcagtgggaggcctgccagggtgacaagaagcagggggagtcctcctcgacacgaggccgcaaacgcggcaagccgcgcaaggcgcgtggaggcgcccaggccggggcgcgaggacatgctgagggtggtgcacgtggaggtgcccaaggcggcgccgtcggcaacaagaagccggcacgagacgacggctgccacaactgcggcaagcttggccactgggccagggattgtcggcagctacgacgtggccaggccaacgtcgcacaggcggaggcggaggaggaggccctgctcctggcacatgcaagcatcgagccatctccagcggcaccggccgcagcggcactcctccaccttgatgagtcgaaagcacgcgctttcctcggcgacggctccaacaaggacatgatcgaaggatggtgcctcgacaccggcgccactcatcacatgaccggccgacgggagttcttcaccgagcttgactctagcgtccgaggctccgtcaagtttggggacgcctccggtgtagagatcaagggcgccggctcagtcgtcttcaccgccacgtctggtgagcacaggctgctcaccggagtctactacatccccgcgttgagaaactctatcatcagtttgggacagctggatgagaacggttcgcgcgtggaggtcgagcacggagtcatgaggatctgggatccctctcgtcgccttcttgccaaggtacgcaggagtgcaaatcggctttacatcctcaatgtgaaggtggcacaaccttgctgccttgctgctcgtcgagacgacggggcatggcagtggcacgagcgcttcgggcaccttaacttcgaagccttgaagcggctcagcgccaaggagatggtacgaggcctgccgtgccttgaccatgtggagcaattctgcgatgtctgcgtgttgacaaagtagagactgctccccttcccccagcagtcgagcttccgagccaaggagaggctcgagctcgtgcatggggacttgtgtggcccggtgacaccagccacaccaggaggacgacgctacttcttgctgctcgtcgacgatctctcccgctacatgtgggtgatgatccttggcagaaagggagaggctgcgaacgccatcaggcgtgtgcaggtcgctgcggaggcggagtgcggccgcaagctgtgatggaataagtcttgagcatctagaggacagcctgcttttgactgtcctctgtagtcctttagcatctagaggacagcttgactgtcctctgtagtctctttagcatctagaggacaacagtcgctttttgactgtcctctgtagtcgctttagcatctagaggacagcagtcgcttttgactgtcctctgtagtctctttagcatctagaggacaatcctgttgtatagtgtgtgtgagaaggtgtggtagtgcagcccctagggctataaatatgtgtccccaacccctctaagggtatggcattgtgtagtgtttgaagaaataaacagaaaattgccccaactcatagtgtcatcctctgatgagagttagagtccctctacttacaattggtatcagagccaaactatcctgcagcctaaacatctcgtgctcatctccttcccgtgcctctccccacactcagtcggtagcaagagctccaactgttccttcctcccctgctcaaacgagcagcctttcgtctgagacagcctcttccacacgcagcgacccctcactagcccaccatgtccctacgctcggccacttcgagtgcgcggcgccagcaggaggccgaggtcgccgcggcacaagaacgcgagcgagcagcagcagcggctgcagcgacagcggcgagggcagcacggttggcggcggcggaactggcagcggcgagagcggaagtagaagcagcggaggcggcggatgctgcacgtgcggcggcaacagagctcgaggttctgcgcggcagtagagctggcagctctgcttctgtcgacgacaacaccgacgacgagctcaggctggcgagggaagcagcgcgagagcaggcggcacagtgggcagccgcgcatccccatgggggcgcgcgtggcggcagcccggataggcgccgacacgctgacggcgctccaggcgggggcgcacgcggcggcagcccagacgggcgtagacgcgccggcggtgctctcggcggcggcgaccgagtcgacggagatcgcggcctctacaggcggcgcggttctccctccccggatcggtaccatggtcgtcgcatggcccaagccattgtcagggacatcggtcccgacggtgggtggcctaccctcaccaagaccaactacgtcgagtgggccgcggtgatgagggtacggctccaggttcgccacatgtgggaagcagttcgttacgacgacgtcgactaccacgaggatcggcgggcgctggatgctctcattgctgcagtcccgcccgagatgcagttttcgctttcccagaagcggactgccaagaaggcctgggacgccatcgctgcgacccgcatcggcagcgatcgtgcccgcaagaccacactgcagacacttcgcaaggagtgggagaacctggccttcaagccaggtgaggatgttgatgactttgctctctgcctcaacactctgttgcagaagatggtgcagttcggtgacgacacctacgatgaggagagagctgttgagaagctcttccgttgcatccccgagaagtacaggcagattgctcgctcgatcgagtctctgctagacctctccacgatgacgatcgaagaggcgattggtcgcctcaagggggtcgacggcgacgaaccacaggctctctctgggcctatcactatcggcgggaagctacatctcactcgggagcagtgggaggcctgccagggtgacaagaagcagggggagtcctcctcgacacgaggccgcaaacacggcaagccgcgcaaggcgcgtggaggcgcccaagccggggcgcgaggacatgctgagggtggtgcacgtggaggtgcccaaggcggcgccgtcggcaacaagaagccggcacgagacgacggctgccacaactgcggcaagcttggccactgggccagggattgtcggcagccacgacgtggccaggccaacgtcgcacaggcggaggcggaggaggaggccctgctcctggcacatgcaagcatcgagccatctccagcggcaccggccgcagcggcactcctccaccttgacgagtcgaaagcacgcgctttcctcggcgacggctccaacaaggacatgatcgaaggatggtgcctcgacaccggcgccactcatcacatgaccggccgacgagagttcttcaccgagcttgactctagcgtccgaggctccgtcaagtttggggacgcctccggcgtagagatcaagggcgccggctcagtcgtcttcaccgccgcgtctggtgagcacaggctgctcaccggagtctactacatccccgcgttgaggaactctatcatcagcttgggacagctggatgagaacggttcgcgcgtggaggtcgagcacggagtaatgaggatctgggatccctctcgtcgccttcttgccaaggtacgcaggagtgcaaatcggctttacatcctcaatgtgaaggtggcacaaccttgctgccttgctgctcgtcgagacgacggggcatggcagtggcacgagcgcttcgggcaccttaacttcgaagccctgaagcggctcagcgccaaggagatggtacgaggcctgccgtgccttgaccatgtggagcaattctgcgatgtctgcgtgttgacaaagcagagacgactccccttcccccagcagtcgagcttccgagccaaggagaggctcgagctcgtgcatggggacttgtgtggcccggtgaccccagccacaccaggaggacgacgctacttcttgctgctcgtcgacgatctctcccgctacatgtgggtgatgatccttggcagaaagggagaggctgcgaacgccatcaggcgtgtgcaggtcgctgcggaggcggagtgcggccgcaagctgtgatggaataagtcttgagcatctagaggacagcctgcttttgactgtcctctgtagtcctttagcatctagaggacagcttgactgtcctctgtagtctctttagcatctagaggacaatcctgttgtgtagtgtgtgtgagaaggtgtggtagtgcagcccctagggctataaatatgtgtccccaacccctctaagggtaatggcattgtgtagagtttgaggaaataaacagaaaattgccccaactcatagtgtcatcctcttgatgagagttagagtccctctacttacaattggtatcagagccaaactatcctgcagcctaaacatctcttgctcatctccttcccgcgcccctccccacactcagtcggcagcaagagctccaactgttccttcctcccctgctcagacgagcagcctttcgtctgagacagcctcttccacacgcagcgacccctcactagcccacgatgtccctacgctcggccacttcgagtgcgcggcgccagcaggaggccgaggtcgccgcggcacaagaacgcgagcgagcagcagcagcggctgcagcgacagcggcgagggcagcacggttggcggcggcggaactggcagcggcgagagcggaagtagaagcagcggaggcggcggatgctgcacgtgcggcggcaacagagctcgaggttctgcgcggcagtagagctggcagctctgcttctgtcgacgacaacaccgacgacgagctcaggctggcgagggaagcagcgcgagagcaggcggcacagtgggcagccgcacatccccatgggggcgcgcgtggcggcagcccggataggcgccgacacgctgacggcgctccaggcgggggcgcacgcggcggcagcccagacgggcgtagacgcgccggcggtgctcccggcggcggcgaccgagtcgacggagatcgcggcctctacaggcggcgcggttctccctccccggatcggtaccatggtcgtcgcatggcccaagccattgtcagggacatcggtcccggcggtgggtggcctaccctcaccaagaccaactacgtcgagtgggccgcggtgatgagggtacggctccaggttcgccacatgtgggaagcagttcgttacgacgacgtcgactcccacgaggatcggcgggcgctggatgctctcattgctgcagtcccgcccgagatgcagttttcgctttcccagaagcggacagccaaggaggcctgggacgccatcgctgcgacccgcatcggcagcgatcgtgcccgcaagaccacactgcaggcacttcgcaaggagtgggagaacctggccttcaagccaggtgaggatgttgatgactttgctctccgcctcaacactctgttgcagaagatggtgcagttcggcgacgacacctacgatgaggagagagctgttgagaagctcttccgttgcatccccgagaagtacaggcagattgctcgctcgatcgagtctctgctagacctctccacgatgacgatcgaagagtcgattggtcacctcaaggtggtcgacggcgacgaaccacaggctctctctgggcctatcactatcggcgggaagctacatctcactcgggagcagtgggaggcctgccagggtgacaagaagaagggggagtcctcctcgacacgaggccgcaaacgcggcaagccgcgcaaggcgcgtggaggcgcccaggccggcgcgcgaggacatgctgagggtggtgcacgtggaggtgcccaaggcggcgccgtcggcaacaagaagccggcacgagacgacggctgccacaactgcggcaagcttggccactgggccagggattgtcggcagccacgacgtggccaggccaatgtcgcacaggcggaggcggaggaggaggccctgctcctggcacatgcaagcatcgagccatctccagcggcaccggccgcagcggcactcctccaccttgatgagtcgaaagcacgcgctttcctcggcgacggctccaacaaggacatgatcgaaggatggtgcctcgacaccggcgccactcatcacatgaccggccgacgggagttcttcaccgagcttgactctagcgtccgaggctccgtcaagtttggggacgcctccggcgtagagatcaagggcgctggctcagtcgtcttcaccgccgcgtctggtgagcacaggctgctcaccggagtctactacatccccgcgttgaggaactctatcatcagcttgggacagctggatgagaacggttcacgcgtggaggtcgagcacggagtcatgaggatttgggatccctctcgtcgccttcttgccaaggtacgcaggagtctaaatcggctatacatcctcaatgtgaaggtggcacaaccttgttgtcttgctgctcgtcgagacgatggggcatggcagtggcacgagcgctttgggcaccttaacttcgaggccctgaagcggctcagtgccaaggagatggtacgaggcctgccgtgccttgaccatgtggagcaattctgcgatgtctgcgtgttgacaaagcagagatggctcccctttccccagcagtcgagcttccgagccaaggagaggcttgagctcgtgcatggggacttgtgtggcccggtgacaccagccacaccaggaggacgacgctacttcttgctgctcgtcgacgatctctcccgctacatgtgggtgatgatccttggcagcaagggagaggctgcgaacgccatcaggcgtgtgcaggtcactgcggaggcggagtgcggccgcaagctgcgcgtgctgcgcaccaacaacggcggcgaattcacgacggctgagttcgcgtcgtactgcgcggatgagggcgttcagcgccactactccgcgccgtacagcccgcagcagaacggcgtcgtcgagcggcgcaaccagacggttgtggggatggctcgggctctcctcaagcagagaggaatgccagctgtcttctggggagaggcggtggtgacagcgggttacatcctcaaccgctcgcccaccaaggctctcaacgggatgacaccgtacgaggcttggcatgggcgcaagccggcggtctctcacctacgggtcttcggctgcctcgcgttcaccaaggagcttggccacatcagcaagctcgacgataggagcaccccgggggtgttcattggctacgcggagggctcgaaggcctaccgcatctttgacccaagaacacagcgtgtgcgcacggcgcgcgacgtagtgttcgacgaagggcgaggttgggcgtgggacaaggcggtggacgacggcacgactccgacgtacgacttcaccatcgagtacgtccactttgagggagctgggggagtaggcaactcttctccgagcaggtctaccccagcccccaagtctccaccgcctccagcgccactctctccagctcctgctacaacgagctcttcaccaccacgcactccagccacgactccggctacagcgagctcttcgccaccacgtactccagcaccgacggtaccctctccgggaacgtcctctccgacaccagctcgtgtcgagcacgacccagtggagctcgtgacccctctgtcccgcgacgaggagcgcgtcgacgcgtgctacgccggcgagccgttgcggtatcgaagggtggagggccttctcatcgacccgtcggtgccaggccctgcatctcgcattctggcaggagagttgcatcttgcatgcgacgatggtgagcctcggtctttcgcggaggccgagcaacatgcggcttggcgtgccgcgatgcagtcggagatggacgcggttgagacgaaccgcacttgggagctcgctgatctccctcatggtcatcgcgcgatcacccttaagtgggtgttcaaactgaagagggatgaagccggcgccatcgtcaagcataaggctcgcttggtggcacgcggtttcttgcagcaggaggggatcgacttcgacgatgccttcgcccctgtagcacggatggaatccgtgcgactccttgcgctggcagccctggagggctggcatgttcatcacatggatgtcaagtcggcgtttcttaacggcgacttaaaggaggaggtctatgtacaccagccgccaggttttgcgatccctggcaaggagggcaaggtgttgcgcctgcgcaaggctctctacggcttgcgacaggcaccaagggcgtggaatgccaagctggattccacgctcaagaggatgggcttcatgccaagcccgcacgaggcggccatctatcgacggggcaatggagaaaatgccctgctggtgggtgtctacgtcgacgacttggtgatcaccggcgccaaggatgcagaggtggcagcgttcaaggaagagatgaaggccaccttccaaatgagtgacctggggcatctctccttctacctggggattgaggtgcaccagggagactccgggatcacacttcgccagaccgcctacgccaagcgcattgttgagctggctgggctcatcgactgcaacccagctctcactccgatggaggagaggctgaagctgagtcgcgacagcacgacgaaggaggtggatgctacacagtaccggcgtcttgtggggagccttcgctacctcgtccacacacggcctgacttggcatactccgtcggctacgttagtcggtttctgcagcgatcgacgacggagcatgagcaggctgtgaagaggatcatccgctatgttgcggggactctcgaccacggtctctactacccgaggtgccctggggaggcacaccttgtcgggtacagcgatagcgaccacgccggcgacatcgacaccagcaagagcacaagcgggatcctcttcttcctcggcaagtgccccatcagctggcagtcggtcaagcagcaggtggtggccatgtccagctgcgaggccgagtacatagcagcgtccactgcttcgactcaggctctctggctggctcgactgctcggtgatctcctcgggagagacactggagcggtggaactcagggtggacagccagtccgctctggcattggccaagaaccccgtgttccatgaacggagcaagcacatccggctgagataccacttcatccgagactgcttggcagaagggagcatcaaggcgtgctacatcaacaccaaggatcagcttgcagacctgctcaccaagccccttgggaagatcaagtttgttgagctttgctccaggtccgggatggcccaactttctcacaagacgacgcccaagacttagggggagaatgatggaataagtcttgagcatctagaggacagcctgcttttgactgtcctctgtagtctctttagcatctagaggacagcagtcgctttttgactgtcctctgtagtcgctttagcatctagaggacagcagtcgcttttgactgtcctctgtagtctctttagcatctagaggacaatcctgttgtatagtgtgtgtgagaaggtgtggtagtgcagcccctagggctataaatatgtgtccccaacccctctaagggtatggcattgtgtagtgtttgaggaaataaacagaaaattgccccaactcatagtgtcatcctcttgatgagagttagggtccctctacttacaagctgcgcgtgctgcgcaccgacaacggcggcgaattcacggcggctgagttcgcgtcgtactgcgcggatgagggcgttcagcgccactactccgcgccgtacagcccgcagcagaacggtgtcgtcgagcggcgcaaccagacggttgtggggatggctcgagctctcctcaagcagagaggaatgccagctgtcttctggggagaggcggtggtgacagcggtttacatcctcaaccgctcgcccaccaaggctctcaacgggatgacaccgtacgagacttggcatgggcgcaagccggcggtctctcacctacgggtcttcggctgcctcgcgttcaccaaggagcttggccacatcagcaagctcgacgataggagcaccccgggggtgttcattggctacgcggagggctcgaaggcctaccgcattcttgacccaagaacacagcgtgtgcgcacggcgcgcgacgtagtgttcgacgaagggcgaggatgggcgtgggacaaggcggtggacgacggcacgactccgacgtacgacttcaccatcgagtacgtccaatttgagggagctgggggagtaggcaactcttctccgagcaggtctaccccagcccccaagtctccaccaactccagcgccacactctctagctcctgctacaacgagctcttcaccaccacgcactccagccacgactccggctacagcgagctcttcgccaccacgtactccagcaccgacggtaccctctctgggaacgtcctctccgacaccagctcgtgtcgagcacgacccagtggagctcgtgacccctctgtcccgcgacgaggagcgcgtcgacgcgtgctacgccggcgagccgttgcggtatcgaagggtggagggccttctcatcgacccgtcggtgccaggccctgcatctcgcattctggcaggagagttgcatcttgcatgcgacgatggtgagcctcggtctttcgcggaggccgagcaacatgcggcttggcgtgccgcgatgcagtcggagatggacgcggttgagacgaaccgcacttgggagctcgctgatctccctcatggtcatcgcgcgatcacccttaagtgggtgttcaaactgaagagggatgaagccggcgccatcgtcaagcataaggctcgcttggtggcacgcggtttcttgcagcaggaggggatcgacttcgacgatgccttcgcccctgtagcacggatggaatccgtgcgactcctcctcgcgttggcagccctgaagggctggcatgttcatcacatggatgtcaagtcggcgtttcttaacggcgacttaaaggaggaggtctacgtacaccagccgccaggttttgcgatccctggcaaggagggcaaggtgttgcgtctgcgcaaggctctctacggcttgcgacaggcaccaagggcgtggaatgccaagctggattccacgctcaagaggatgggcttcatgccaagcccgcacgaggcggccatctatcggcggggcaatggaggaagtgccctgctggtgggtgtctacgtcgacgacttggtgatcaccggcgccaaggatgcagaggtggcagcattcaaggaagagatgaaggccaccttccaaatgagtgacccggggcacctctccttctacctggggattgaggtgcaccagggggactccgggatcacacttcgccagaccgcctacgccaagcgcattgttgagctggctgggctcaccgactgcaacccagctctcactccgatggaggagaggctgaagctgagtcgcgatagcacgacggaggaggtggacgctacacagtaccggcatcttgtggggagccttcgctacctcgtccacacacagcctgacttggcatactccgtcggctacgttagtcggtttctgcagcgaccgacgacggagcatgagcaggctgtgaagaggatcatccgctatgttgcggggactctcgaccacggtctctactacccgaggtgccctggggaggcacaccttgtcgggtacagcgatagcgaccatgccggcgacatcgacaccagcaagagcacaagcggaatcctcttcttcctcggcaagtgccccatcagctggcagtcggtcaagcagcaggtggtggccatgtccagctgcgaggtcgagtacatagcggcgtccactgcttcggctcagacgctctggctggctcgactgctcggtgatctcctcgggagagacactggagcggtggaactcagggtggacagccaatctgctctggcattggccaagaaccccgtgttccatgaacggagcaagcacatccggctgagataccacttcatccgagcctgcttggcagaagggagcatcaaggcgcgctacatcaacaccaaggatcagcttgcagacctgctcaccaagccccttggtaagatcaagtttgttgagctttgctacaggtccgggatggcccaactttctcacaagacgacgcccaagacttagggggagaatgatggaataagtcttgagcatctagaggacagcctgcttttgactgtcatctgtagtcctttagcatctagaggacagcttgactgtcctctgtagtctatttagcatctagaggacagcagtcgcttttttgactgtcctctgtagtcgctttagcatctagaggacaacagtcgcttttgactgtcctctgtagtcgctttagcatctagaggacaatcctgttgtgtagtgtgtgtgagaaggtgtggtagtgcagcccctagggctataaatatgtgtccccaacccctctaagggtatgccattgtgtagtgtttgaagaataaacagaaaattgccccaactcatagtgtcatcctcttgatgagagttagagtccctctacttacagagccatctccagcggcaccggccgcagcggcactcctccaccttgatgagtcgaaagcacgcgttttcctcggcgacggctccaacaaggacatgatcgaaggatggtgcctcgacaccggcgccactcatcacatgaccggccaacgggagttcttcaccgagcttgactctagcgtccgaggctccgtcaagtttggggacgcctccggcgtagagatcaagggcgccggctcagtcgtcttcaccgccgcgtctggtgagcacaggctgctcaccggagtctactacatccccgcgttgagtaactctatcatcagcttgggacagctggatgagaacggttcgcgcgtggaggtcgagcacggagtcatgaggatctgggatccctctcgtcgccttcttgccaaggtacgcaggagtccaaatcggctatacatcctcaatgtgaaggtggcacaaccttgctgccttgctgctcgtcgagacgacggggcatggcagtggcacgagcgcttcgggcaccttaacttcgaagccctgaagcggctcagcgccaaggagatggtacgaggcctgccgtgccttgaccatgtggagcaattctgcgatgtctgcgtgttgacaaagcagagacgactcccctttccccagcagtcgagcttccgagccaaggagaggctcgagctcgtgcatggggacttgtgtggcccggtgacaccagccacaccaggaggacgacgctacttcttgctgctcgtcgacgatctctcccgctacatgtttgtgatgatccttggcagcaagggagaggctgcgaacgccatcaggcgtgtgcaggtcgctgcggaggcggagtgcggccgcaagctgcgcgtgctgcgcaccgacaacggcggcgaattcacggcggctgagttcgcatcgtactgcgcggatgagggcgttcagcgtcactactccgcgccgtacagcccgcagcagaacggcgtcgtcgagcggcgcaaccagacggttgtggggatggctcgggctctcctcaagcagagaggaatgccagctgtcttctggggagaggcggtggtgacagcgggttacatcctcaaccgctcgcccaccaaggctctcaacgggatgacaccgtacgaggcttggcatgggcgcaagccggcggtctctcacctacgggtcttcggctgcctcgcgttcaccatggagcttggccacatcagcaagctcgacgataggagcaccccgggggtgttcattggctacgcggagggctcgaaggcctaccgcattcttgacccaagaacacagcgtgtgcgcacggcgcgcgacgtagtgttcgacgaagggcgaggatgggcgtgggacaaggcggtggacgacggcacgactccgacgtacgacttcaccatcgagtacgtccaatttgagggagctgggggagtaggcaactcttctccgagcaggtctaccccagcccccaagtctccaccaactccagcgccacactctctagctcctgctacaacgagctcttcaccaccacgcactccagccacgactccggctacagcgagctcttcgccaccacgtactccagcaccgacggtaccctctccgggaacgtcctctccgacaccagctcgtgtcgagcacgacccagtggagctcgtaacccctctgtcccgcgacgaggagcgcgtcgacgcgtgctacgacggcgagccgttgcggtatcgaagggtggagggccttctcctcgacccgtcggtgccaggccctgcatctcgcattctggcgggagagttgcatcttgcatgcgacgatggtgagcctcggtctttcgcggaggccgagaaacatgcggcttggcgttctgcgatgcagtcggagatggacgcggttgagacgaaccgcacttgggagctcgctgatctccctcatggtcatcgcgcgatcacccttaagtgggtgttcaaactgaagagggatgaagtcggcgccatcgtcaagcataaggctcgcttggtggcacgcggtttcttgcagcaggaggggatcgacttcgacgatgccttcgcccctgtagcacggatggaatccgtgcgactcctcctcgcgctggcagccctggagggctggcatgttcatcacatggatgtcaagtcggcatttcttaacggcgacttaaaggaggaggtctacgtacaccagccgccaggttttgcgatccctggcaaggaaggcaaggtgttgcgcctgtgcaaggccctctacggcttgcgacaggcaccaagggcgtggaatgccaaactggattccacgctcaagaggatgggcttcatgccaagcccgcacgaggcggccatctatcggcggggcaatggagaaaatgccctgctggtgggtgtctacgtcgatgacttggtgatcaccggcgccaaggatgcagaggtggcagcattcaaggaagagatgaaggccaccttccaaatgagtgacccggggcacctctccttctacctggggattgaggtgcaccagggggactccgggatcacacttcgccagaccgcctacgccaagcgcattgttgagctggctgggctcaccgactgcaacccagctctcactccgatggaggagaggctgaagctgagtcgcgatagcacgacggaggaggtggacgctacacagtaccggcgtcttgtggggagccttcgctacctcgtccacacacagcctgacttggcatactccgtcggctacgttagtcggtttctgcagcgaccgacgacggagcatgagcaggctgtgaagaggatcatccgctatgttgcggggactctcgaccacggtctctactacccgaggtgccctggggaggcacaccttgtcgggtacagcgatagcgaccatgccggcgacatcgacaccagcaagagcacaagcggaatcctcttcttcctcggcaagtgccccatcagctggcagtcggtcaagcagcaggtggtggccatgtccagctgcgaggtcgagtacatagtggcgtccactgcttcggctcagacgctctggctggctcgactgctcggtgatctcctcgggagagacactggagcggtggaactcagggtggacagccaatccgctctggcattggccaagaaccccgtgttccatgaacggagcaagcacatccgactgagatagcacttcatccgagcctgcttggcagaagggagcatcaaggcgcgctacatcaacaccaaggatcagcttgcagacctgctcaccaagccccttggtaagatcaagtttgttgagctttgctccaggtccgggatggcccaactgtctcacaagacgacgcccaagacttagggggagaatgatggaataagtcttgagcatctagaggacagcctgcttttgactgtcatctgtagtcctttagcatctagaggacagcttgactgtcctctgtagtctctttagcatctagaggacagcagtcgcttttttgactgtcctctgtagtcgctttagcatctagaggacaacagtcgcttttgactgtcctctgtagtcgctttagcatctagaggacaatcctgttgtgtagtgtgtgtgagaaggtgtggtagtgcagcccctagggctataaatatgtgtccccaacccctctaagggtatgccatagtgtagtgtttgaagaaataaacagaaaattgccccaactcatagtgtcatcctcttgatgagagttagagtccctctacttacagagccatctccagcggcaccggccgcagcggcactcctccaccttgatgagtcgaaagcacgcgttttcctcggcgacggctccaacaaggacatgatcgaagaatggtgcctcgacaccggcgccactcatcacatgaccggccaacgggagttcttcaccgagcttgactctagcgtccgaggctccgtcaagtttggggacgcctccggcgtagagatcaagggcgccggctcagtcgtcttcaccgccgcgtctggtgagcacaggctgctcaccggagtctactacatccccgcattgagtaactctatcatcagcttgggacagctggatgagaacggttcgcgcgtggaggtcgagcacggagtcatgaggatctgggatccctctcgtcgccttcttgccaaggtacgcaagagtccaaatcggctatacatcctcaatgtgaaggtggcacaaccttgctgccttgctgctcgtcgagacgacggggcatggcagtggcacgagcgcttcgggcaccttaacttcgaggccctgaagcggctcagtgccaaggagatggtgcgaggcctgccgtgccttgaccatgtggagcaattctgcgatgtctgcgtgttgacaaagcagagacggctcccctttccccagcagtcgagcttccgagccaaggagaggctcgagctcgtgcatggggacttgtgtggcccggtgacaccagccacaccaagaggacgacgctacttcttgctgctcgtcgacgatctctcccgctacatgtgggtgatgatccttggcagcaagggagaggctgcaaacgccatcaggcgtgtgcaggtcgctgcggaggcggagtgcggccgcaagctgcgcgtgctgcacaccgacaacggcggcgaattcacggcggctgagttcgcgtcgtactgcgcggatgagggcgttcagcgccactactccacgccatacagcccgcagcagaacggcgtcgtcgagcggcgcaaccagacggttgtggggatggctcgggctctcctcaagcagagaggaatgccagctgtcttctggggagaggcggtggtgacagcgggttacatcctcaaccgctcgcccaccaaggctctcaacgggatgacaccgtacgaggcttggcatgggcgcaagccggcggtctctcacctacgggtcttcggctgcctcgcgttcaccaaggagcttggccacatcagcaagctcgacgataggagcaccccgggggggttcattggctacgcggagggctcgaaggcctaccgcatccttgacccaagaacacagcgtgtgcgcacggcgcgcgacgtagtgttcgacgaagggcgaggatgggcgtgggacaaggcggtggacgacggcacgactccgacgtacgacttcaccatcgagtacgtccactttgagggagctgggggagtaggcaactcttctccgagcaggtctaccccagcccccaagtctccaccgactccagcgccacactctccagctcctgctacaacgagctcttcaccaccacgcactccagccacgactccggctacagcgagctcttcgccaccacgtactccagcaccgacggtaccctctccgggagcgtcctctccgacaccagctcgtgtcgagcacgacccagtggagctcgtgacccctctgtcccgcgacgaggagcgcgtcgacgcgtgctacgacggcgagccgttgcggtatcgaagggtggagggccttctcatcgacccgtcggtgccaggccctgcatctcgcattctggcaggagagttgcatcttgcatgcgacgatggtgagcctcggtctttcgcggaggccgagaaacatgcggcttggcgtgctgcgatgcagtcggagatggacgcggttgagacgaaccgcacttgggagctcgctgatctccctcatggtcatcgcgcgatcacccttaagtgggtgttcaaactgaagagggatgaagccagcgccatcgtcaagcataaggctcgcttggtggcacgcggtttcttacagcaggaggggatcgacttcgacgatgccttcgcccctgtagcacggatggaatccgtgcgactcctccttgcgctggcagccctggagggctggcatgttcatcacatggatgtcaagtcggcgtttcttaacggcgacttaaaggaggaggtctacgtacaccagccgccaggttttgcgatccctggcaaggagggcaaggtgttgcgcctgcgcaaggctctctacggcttgcgacaggcaccaagggcgtggaatgccaagctggattccacgctcaagaggaagggcttcatgccaagcccgcacgaggcggccatctatcggcggggcaatggagaaaatgccctgctggtgggtgtctacgtcgacgacttggtgatcaccggcgccaaggatgcagaggtggcagcattcaaggaagagatgaaggccaccttccaaatgagtgacttggggcatctctccttctacctggggattgaggtgcaccagggagactccgggatctcacttcgccagaccgcctatgccaggcgcattgttgagctggctgggctcaccgactgcaacccagctctcactccgatggaggagaggctgaagctgagtcgcgacagcacgacggaggaggtggatgctacacagtaccggcgtcttgtggggagccttcgctacctcgtccacacacgacctgacttggcatactccgtcggctacgttagtcggttcttgcagcgaccgacgacggagcatgagcaggctgtgaagaggatcatccgctatgttgcggggactctcgaccacggtctctactacccgaggtgccctggggaggcacaccttgtcgggtacagcgacagcgaccacgccggcgacatcgacactagcaagagcacaagcgggatcctcttcttcctcggcaattgcctcattagctggcagtcggtcaagcagcaggtggtggccatgtccagctgcgaggccgagtacatagcggcgtccactgcttcgactcaggcgctctggctggctcgactgctcgnnnnnnnnnnnnnnnnnnnnnnnnnnnnnnnnnnnnnnnnnnnnnnnnnnnnnnnnnnnnnnnnnnnnnnnnnnnnnnnnnnnnnnnnnnnnnnnnnnnnnnnnnnnnnnnnnnnnnnnnnnnnnnnnnnnnnnnnnnnnnnnnnnnnnnnnnnnnnnnnnnnnnnnnnnnnnnnnnnnnnnnnnnnnnnnnnnnnnnnnnnnnnnnnnnnnnnnnnnnnnnnnnnnnnnnnnnnnnnnnnnnnnnnnnnnnnnnnnnnnnnnnnnnnnnnnnnnnnnnnnnnnnnnnnnnnnnnnnnnnnnnnnnnnnnnnnnnnnnnnnnnnnnnnnnnnnnnnnnnnnnnnnnnnnnnnnnnnnnnnnnnnnnnnnnnnnnnnnnnnnnnnnnnnnnnnnnnnnnnnnnnnnnnnnnnnnnnnnnnnnnnnnnnnnnnnnnnnnnnnnnnnnnnnnnnnnnnnnnnnnnnnnnnnnnnnnnnnnnnnnnnnnnnnnnnnnnnncgagagctgtctcactgagttgtgagtttgaagcagtctttccgcatttgcgcggggggggggtgatggaataagtcttgagcatctagaggacagcctgcttttgactgtcctctgtagtcctttagcatctagaggacaacagtcgctttttgactgtcctctgtagtctctttagcatctagaggacaacaatcgcttttgactgtcctctgtagtcgctttagcatctagaggacagcagtcgctttttgactgtcctctgtagtctctttagcatctagaggacaatcctgttgtgtagtgtgtgtgagaaggtgtggtagtgcagcccctagggctataaatatgtgtccccaacccctctaagggtatagcattgtgtagtgtttgaggaaataaacagaaaattgacccaactcatagtgtcatcctcttgatgagagttagagtccctctacttacagggggagacttgtctcggtttatccctcccttagaccccactcatgtgggagcctccgacattggatgtactctatttgttttaaatatatgcagataaatattattttctaacaatggtgctaattcatgtataaaagtaaggagtaaaatgcatcaggtccccgaactctcaaaactaggattacgtgtcttcgaacttgacgtcttggccggtcatccaaaaccagatttgctcaaactggatgccgatgtggcgtgccatgttggagtcactttggtccccgaacttggcatgctgtatcacttgggtctcagaacttggcattttgtgccacttggcttcccgaactttctttagtacgcttcagcgtggcatgctacgttggcatcgggtttgaacaaactcggttttggatggccgactaagttcgaggacccgttttgctggttttgaaaattcgatgacccaagtgacaaatcatgctaagttcgaggaccactgatgtattttactcaaagttaagttttgggatgtgtttattgggctagggcatgctagtggggtttctctcgttgcaaaacaggggcttgtttgcaaatagttctaaaggcaccttgtgtgtgaaatgtgggttctgtgtgccaatgtcaacaagttttatggatcttgattatagatcgaattgctagaaatatagtagttcaaacagatattggaactggagctacaatttagtcattaatatactattacttcaagtatgtatgggtatcaactatcaaacataggttgtgtttgcttcagcatctgaaaagtgcttctgctctactttattgtattacaatttaactagcaccttggactatacttttggcttccaaccttttacttctccaaatggttggaaacagaaagaaattttacatgtgtatccagggcatgcttatcaagacgtccattaagcgtcacattagagtcgctttagcgctaaggcgcactcacagggcaaggcgtctagcttgccttgtgctggggagtaagacgtccgccgcggcgtaaggcgctggtggggcgtcggcagggcgttctcggagcgtcggcggggcgacgcttaggggataggtagggttttgaagggcgacggctggaaacagagaagagggtttgacctgtgtctgtgtggcagctgcagctgctgcctccttcctcgtcggcgcgcagtgctccggccatcggaggtgggagactgcggtggaagaaccgagggagagagagagaggagagctgtgggggagggagagagaggggactgaagagagatgcagcgtgagggaaaaatagaggctggcggctgctactaggttgctggcggctgtgacctaaaactgtgttttgggctgagctgggccgagttgggctggactcacttgttgtgaggttctttcctgccttttttttctgcttctactagactgaaattggacatattagaccttataaaagtgctagcttgcttattaactttaaattagtgatatataaataatgtttgatctaatttttttgatatttatctatataactaaggcctcgcctcgccttacgctttatcgcctaaaagataaaagagggttggtcgccttatgtcgccttaccgccttaataactatgatcaagggagagaaagaaaggggtaggcttcatagttgtttcaaccaaacaatttatctttttcatagtgcatagctcacatcatcttttccaaagctcacaactcacaacaacttttctatagcttagttgacccaaacaagcccataattgctttttgtttggacctaccagctaattactcatgtgagagcctctgacactaggtttgtcctactaactaactacacaacacatcataggtacgtaacctttagctctctagaaaacttgggcaagtaattcagccaccctgaaatggtgctctataaatgtctcggcttgccaaattttgtttgggccagccaaaatttgacctccaccttgggctcaactctctgaccatattgggcgcttggatcatatggaatggaaccactgtaactgttgttttattgatttttttctcgaaaagcgcaggagaactgcaccccattatattaagaccgttgtttttattgatgctaagtgtttctgaagccatgatcgtggcaggagaagagcgtcaactttggtctatgacaggggctagaggaatctcctgcttgattgtccccaaggttttgagtgcttttttagatgggacattctatgtctcctttttaatcagtgtgtttgtaactattaaatgtggtgtttgttgtgtgggttgtggttcctaaccgaatttcttcttaatataataaagtgccatctctactgcattttcgagaactttttttgacctccaagtggttgccagattgttggggcacgaccaaattttgattttgcatcctatgagtctcatactaaacgtgtcgtgaatatccttgttttatccatgatcattcatttattcatttgcttgtgccttctgtgtagacatgttttttttgcaggtatatgtgtggttgcacactcataagttgcagttgctactaccttgttagttagtctatggttttgctgctttgattgaaccaaaataaaatgttagttgcaaacttttgtcaactcagctgtgtctgtcatttgtttagtattgtcctccattatcattaaggatcagagactttgtaaatggattagtttttcatgaatgttatgatgaaaaatgatattgttctgttctttaaatatattctttgctcgcaacttatattaattgtccttgggctatgttctcatgtctattgcaggttgaatgtttacttgtagaaggtgtcttgggcaaaaggaatcttgtgtattgtgcatccacgaggtgtttgcagatctttcatgtcgttcatacatggacatacctacacacttcacattctcagatgcgtactgtttttttttcaaattccttttctatctaatcttatgtgtatattttttgttgttaaatttgcagtgctggtaaaagttttgttgctgaagttctgatgttgaggcagatactgtcaactgggaatatggcaattcttgtccttccctatgtgtcaatatgcgctgaaaaggtttttgatgatttatacagctttggattggtctgaaacatacttgtgtttgattatttatttatcttttacaggctgaacatcttgaacaacttcttgagccactgggtaggcatgtccgtagcttctacggaaaccaggggggaggctcacttcctaaagatacagcagttgctgtatgtaccatagagaaggcaaactctttggtaaacaagttgttggaggatggccgcctctctgaacttggtgtaattgtcatagatgaacttcatatggtaagcttgtctaaaaccgaagtgctgctcagaacatcctctctttgctttaaaccttttgttgttggtactttcatggttatttataccacatctattttgttatgcaagttcattgccttaggaactgtcatttcagcaatctaggtttgtgacagcattgagagtactaacgtaattttgtaacatttccattgtttgtaatcttttaatagcatgcacgagataattgccatttaatgaggatatttgttggcctgttgttagctattagtgctccttggccagtgtgcattgtggaattggatttgttttatgaaacagatggagcactagagatctggtactatctggaatctaaaaagtagagcgtgtgcattttgtatgactttcttctttaattaatacaatgatacagaactctcctgcatattgaagaaaaaacgatgtacaattgcattgcaagtagtagaggttttatcattgctaactaagagcactacaaattcttgtataggtggtgtatgtggtattggtgtactgcatatatcaatcagaacttcaaatatgatttttcctctcccccttctctccgcctgggccgttagggagtgaattcagtccaacgcctaggggctagggccaccaatctagtccaagtgatgtacctttccctactgcatcattgtttagttttttaggtgttcttttttgttcaaggtttgggatggttagtcatcaacttatcacccatcctatctaatcaagtaatcttgtgtgttactttacctgttacccgagtttccatattgttaggttataatcattaagagtaatttgtaaataagaaaggtttgtcattatggacaattgccagtaaacaagaaacaacaaggagaagtaccattggtcctggcgctgaatgaattctggcagcatacttatcaaatgcaaatcatataggaagatttgactttccttagggctcccctcatatatttgtaatattaggcccaggaccaatagtctcccagctcgccattcggctaaagcactatggcagtattactatttagcaacccctaccaaaggaagcatatagcttgcatctttacctgtctttgtttacctttccatgcccttgagggttctttcaatctttcttcctgtatcctttgacttagtttgtcgaacatgatgtgatatatagttgaaacttgttaagttctccaattatgcaattaaattaacaggttggtgaccaacatagaggatatcttttagagctgatgttgacaaagcttcgatatgctgctggtgaagggactttacagtcatgtagcggagaagtttcaagttctagcagtgggaagattgcaagtcatgggttgcagataattggtatgagtgctactatgcccaacatcgctgcggtggctgattggcttcaagtaagatatttaattctcctagttttatgtacttaatgaagggatgttttactagtgtgagaaacaacattactaacccacagaagttcaacttagcattgtcgttcatttatcatattagaaagttcaaaggcatttgataaatatgtgagcaattgaacttcctaattccacttgtattttctttcatcaactttttaaggttttttttgctgtctttcttcaaacctatagcctaacatgatatcttcatcaatattatctgatcgtatgatcgaggctactcgtatgaccaccgatcatatgactaatcactattagtcatcgattagttggtctagccagctagtcgaacatttagttgtccatgtgcctagatgacctaatcgaccatgccgagttagtatccatcgctagtctccttcgcgtcgccccacatgggcaacacgggcggaaccaaccctagcaacgcaccttcttcctcacctgattctcctcaccgtcactagagcgcgacttcacaaggaaggcaatggcatgtcattctcctctgcctcgtgatcatcgactctatcaagctcctctaccatggtttgagaaggtgctcctcccagtggccaatctctagattctagatccaccgatctctaggccagacctgcgctggttgggcctatggtggccacacagtggcagtgcagttgtcccctctcctctcacaactcttcgttcgtctttggtgggtgatgcctagatccatcgtcactgtagccggatcaggcatctcccgtgacaacggatctgcggagggcgacaacccttgtggtcccaacttcattttcaagcatgttcgggtgcttctcggctctagcactcggtcaactttggcttggcattggcatgtggcgcaaatgcaatagcaactgcattgctagcttgcatggccaccaaggatgggtgctcttagtgaggcaaacaagtgccaaacctgcaaccatgacataggagatggtgggcttgctcaggcttgcgttggtgtttgtcggtacctcaagactagggtacccactcctactggatcaaggcgggacccctgtggctatccctagtcgcatagccacaggtggtccgccctggctcagaatataggttcgtccgacgaggccgctggcctcaggtgggggccaacttccatgttgggctcttcagatccctagcagcggggctccgaagccgccacatgctccaagtatggggactccctacagctttgcctaggggcctgaccccctctgggtggtcccggacacctgcgtatgctacttgaacctccgacttaaagaggtccggtattgccacgtgtttaggcccgtgccagagggtcccggactcctctgagtaccttccgaacccccaactagtggtgctccggatctgccacgtctacagacactcctggctgattgctccctgctcgggtaaagatccggtgctgccacgtgtcttatggcgtgtgacataagccgtcgggaagagcctggcgtaagcctctggcaaggggaagggccacctgtgttcaaggcgggcagagtgcgcggctgttcacacaagtaatagatggcgcgtaccccgcattaaatgtaggtggcgtgcgcaacctgcaaggcctgcccgcgtcagaatcgcgttaccaaggcaagcccattgcgtagcttggacgcccttcattatgacttctattcctcgcgtgttattgaggcatgagggaacaggcggaggggacgggatgacaccgtccttattctccctacgctcacctacgccgcaacctacgttgtagcctttgcccacatgtcgtagcccctcctcatcttaggattagggcgggtgttatccgtcacctgtctggagtttacctctgaccgtgttgatgtttgtgtggttcgtctctaggtggtctttatagggcacgacaaccatggttggctacaacgagccttgtttgtgggcgtagcttttcacctgcaatggctctgaactagctcgagagttgcatgcggtggtggacgacaatcaacttcaccaggactacatgagtaactatgttgactacacatgttggtgtgaggagagatcttggtgcaagatttggttagtattatcttgagtcgatgatgataacacctttggggggggtgccattcccttttttggaagcgtcgatgaggtgccgtctctccttaccccacgatttgttttgaagaagctctgcctagggtccctaggctggtgatggcggcgcccagcgtcgtatcctgcctgagggcatcaccttgatcccgtactaccatggttgttggtccgcatgggacatttgctgcttgtttgtaagcctcaggttttgatgagttcgctacttgcttaaagcatgtcttttgctctcctagggtagatcaataggtgaagtcagagctgcttttgtggggtgcaacaaagcttggcaatgatgacacattatgttcacttccttcaaaagccgggtcttgttgtgagtaggtggtggtgtgttagggctttggctgatgttcgttgtgggaaatcagatctacgtatcacttttgtgggataagctcgacatcgatgacgtgtggtgtgctctgttggttgtttttgtgtatgtgggttgcttaggattagtcgtatgggttgttgtgtttaggtattggccggttttcctttgataaactgtgtgatgtggtgttttatccctgggtttccttataacctaggtcaattctatttcttaattgaaacttcctagttcctactgcgttaaaaaatgacctgatcaaccatgtatataaataaatttgatataaattggtgaatgggagaggcaagcaaccaagcacattaataacatttccaccttcctctccggcgcggacgtcgcccacctctacgcgtctagcatcgccgccgccgctactacggctccccaggcgttcaccgtgaccaccgccgctgctgcagccactgcggctggactcctacccccaacctctatagcagcctcgacctccctggctacctgacctccacggccgccttcagtgccgcctcgacattcgggactctctccccgaccgacttctcccggcagtcgcccctcggtttcaccgcccgcctgtcgtcgacgtcacttgggctccaccacgtgccgtcgcgccgtccaacgactccgccttggtcgctgccatcgccaccatccaggccgccgtggccgcctcacaggagcgccaacgcgtcgcattactccctctggagcaggaatgggccatgggttaggccctgaccactcagctggccacggctcagcgtatgcttctcggtcgtggcaccccgccaccaccggcagtgcttgcggctcccctggtggtcccggagcctcctcatggctctgggcttgacgtcgacactatcgccgccctccacgcctaggccgctggggttcacaacatacagtccctcatgttggacccgacgtcctcccactaacctcactggcgcgctcaggtggtcctcacccttcggcgtttgccctcactgaccacgtcctcgacgatctcgttgcctcgctgtccccctcctgggtctagatggacaacgtggtcctatcgtggctcaacgacacaatcaccgttgagctgcaggacatcgtctgtgatcaggcagacactgcgcgccagacatggcttgctctcgagggccagttccccaggaaccaggaggctcgggtgctccacctcgacgtccagttccatctgttttctcaggggacctctctgtgggagagtactgccgccagatgaagggcatggcgaactctctccgcgacctcggtgagcctgtcgccgacaacaccaaggtgctgaaccttctacgtggcctcagcccccgctacggccaccggaaggctctcatcaagaggaccgtgcctcaactcccgctatggtcctctcatcaagaggaccatgccgtgcggaacgagcttctttttgagtagctcaccatggagaccgaggctcctccggcatcgacactctacaacgctcctcccggcggtcagacaccctcggggggccaggcctctcgctctccatcgaccgaggcccctgctcgccatccacccgctgtcattgcgactcctcgtccggctttcaccgccgacggaggtcgtcgctccctcaagggcggccgtggggtggcagctccacccgtggtggtccctccggccggggtggcggccaggcgtgaccgtcattctacaacccctggaccaggaccatcgccatgtggccgggctaggcctcgagtgcctcccgctttccggcgtcggccctccagacagcgcctccctacgacgtgccttcgatgcctccctacggcgtgccaccaacgcctccggccgcgccctagcacccgccccgaggaccaccacctcgacgccttggtccccgctggctggcggatggggccctgcatccctcgtcaccgccttcagcaccatggcgatgaccccaccccctccgactgggtggttgattccgagcttcttaccacacaactcccactgcagacacgctctctttgtcccatcccatccattcctcccacccctcctggatcctcgttggcaacgataccactttgccggtcacctcaataggtgcctcggttttccctgggccgttctatctcaacgacgttctcgtagcccctcacataactcacaatcttctttctgttcgtcggttcaccaccgacaacttttgttccattgagtttgacccctctggttttctgtgaaggatctagccacatgacccctctcacccgctgtgacagcgccaagcccctctacacgcttcggccttccaccaccgacgcgtctccacctcccgtcctggtctccaccaccacctctaccacgtgacatcattgtctcggccacccaggacctgatgtcatgaccaaacttaacaacaatttagatccttcatgtagtaggggacattttgatggtctctgtcatgcttgtcagttagaccgacatactcgtctcccattcaccactttttggtttgaggagtcttttgacctggttcattgtgatctctgtacctcccctatactcaatctctttggttataaatactatttggtcattttggatgatttttcccattttctttggacctttcctcttcggttgaagtccgacacgttcaccaccctcacacacttcttcacctaggtctccactcagttccgtcgcccggtccgtgccctacagtgtgacagtggccgcgagttcgacaaccatgcctcccgttctttctttctcaccaacggcgtccagttgcgtctctcgtgcccctacacctctttccagaacggccgggccgaccgcataactctttctcaccatttgctgccttctcttccaggcgtctgtccctgccagctactggggtgaggccctacacaccgccacacaccttctcaactctcttccctcgaaggcggtgagccaccctactcccacttcgccctgtacgacacaaccccttcctacgaccaccttcgcgtgtttggctgtgcctgttatgctaacacttccgccatcgctcctcataagctatctccttgctccactcgctgtctcttccttggctagtcccctgaccacaaagggtattgctgtcttgacctcagctcgcaccgtatcatcatctctcgtcatgtcgtcttcgacgaagatgtgtttccttttgctggctcctcccacccaccgatctcgactccctacttgagtctgatccggttacccctctataagtagatggactctaactctcatcaagaggatgacactataagttcgggcaattttctgtttatttcctcaaacactacacaatgccatacccatctaagggttggagacatatttatagccctagaggttgcactaccacaccttctcacacacactacacaacatgattgtcctctagatgctaaagagactacaaaggacagtcaaaaagcgattgttgtcctctagatgctaaagagactacagaggacagtcaaaaagcgactgttgtcctctagatgctaaagagactacagaggacagtcaaaaagcgactgctgtcctctagatgctaaagagactacagagtacagtcaaaaaacgactgttgtcctctgatgctaaagagactacagaggacagtcaaaaaaacgactgttgtcctctagatgctcaagacttattccatcagcctccaccctaggcgtcccgccttgcgccgttgcctgtaccatgtgcggcctcgacgcctccactcgcgcctctaccggcgcggcgacgacaccgtctacctcctgctctacgtcgatgatattgtgccgacatgcaccgtcgacctcctacagcgcacgatcgtcggccctcagcggtagtttgcgacgaaggacctggggcccctccaccacttcctcggcatcaccgccgaacgctggtcccagggtctcttccttcaccagcgccagtacgccatcgacatcctggagcgggctggcatattcgactgcaagccctgctccacgcctgtcgacacttaggcgaagctctctgaggacggcggcccccggtcgccgacgcgacgtcttaccggagcctgaccggtgcgctccattacctgaccttctctaggcccgacatcgcctacaccatccagcaggtgtgcctgcatatgcacaccccgcgggagccccatctcaccgctcaagcggatcctgtgctacctccgcggctacctcgactacgacctccttctccgaccatccccgacgtcggagctcgtggtctacaccgacgctgactgggccgattgtcccgacacgcgccggtccacttccagttctgccgtgttcctgggcgccaacctcgtctcctgggctgccatgcggcagctcgtcgtctcccgctccagcgccgaggtcgagtattgcgctgtggccaatggtgtggcagaggcctcctagatgcgccagctactacacgagctccacatctctcttcagcgcacaaccctcgtctcttgcggcaatgtcagtgcggtctacctctccaccaaccccgtgcatcatcagagcacgaagcatgtggagatcgacctgcagttcgtccgcgagcgtgtcactgcctgtgacgttcgggttctcagcgtccccaccacgctgcaatacgacgacatcttcaccaaggggttaccgtcgagtgtatttttagactctcgatctagtctcaacatctgatctgtacaagatagagttgcgggggggggggggggnnnnnnnnnngcagattttaaaataaaggtgcacagatttgcttcagctctcttcgcagcctctgtgtgttcggtggttggtaatggggcaaacactctcttctggacagataaatggcttcagggccaatctttgctccagattgcccccgcgctaataaatcgggtgcccgcgaatataagacggcgcagatctgtccaagcagccttaacagccaatggttgggtgcatgatatctctggaagccttacggcgcaggtgctgtttgaatttttattggtttgggatttactccaagaggtgcaactgtaccctaatgtggaggatcaacatcggtggttgccatcctcctcggggctgtattccgccagctctgcttatttgcgcttccatggtggtgcaacaacctttgagcctgctacaagaatctggaagacttgggcccccccgcgctgcaagtatttcatttggcttgcatctctcaaccgatgttggacggctgatcgactggcacgtcatggaatggatcatccagatagttgtcccttgtgtgatcagcaggatgagtcagtgcatcacttgctggtggattgtgtttttacgagggaagtttggtttacaacactaagcaggctaggtttgcaacatcttgctcccacgtctgatgctacannnnnnnnnngggggggggggggtgttagaattccatttacggtttggggttctcctcgtgtaattactctctcacccctgtgtaatgggccatgtcctgttaactcatgtctattaatacatcacccaaccccaagatagagttagggtttcccacactgtgtaatggactaggcctaacaacctgggtctattaatacaactcccaaccctgagttagggttaggttttcccacatgtaatagaggtaggttagtttctctcccccaccccatcccaaccgcccgcttctttcccagcctccggtcgccgtcagctgcatgctctagccgttgtccgccgtgtgctcctccctgtcgtcacatcctgcagccgccgaccccgccatggatcctccccaatccgtccctcccctctccttcgcgctggatgctagcgcggacgccgggcttggtgcgacggcagccgacctcgacatgcgcgccaccgcggccctcgacgcatgcacctcgcccgcgcaccgccgcgaacgccgccgccgtgtacgccgccctaggcgtgaccccctcatcggctgatctgcacggcgccataggcgtgtgccctcccttcgctagctcgctctttccccatggctcgtcgacccgctgcgctcgctgttggcccccctacatcgacggcctcgggcccctccgcggcgcctctcctacgaccttcgctgcacaacagcgccaaggttctctgcctggcttcctcgccctcgctgctcctacatggaccgaggacgtcgcttcctcgtcaggctcctccccaacttcctcgacattggttatggatatcgccaccatccaggcggctgttgcggcctcctaggaccgtgagcgcgccacgactcttgccttggagcgcgagcgcgccatggtgccgacttgaccacccagatggccgtcgcgcaacgcctcctcctcggtcgcagtaccaccccttcaccggtggcccctgggactccccatgcccaagggcttgatgctgacaccatcattaccctccatgcttaggtcgccggggtccacaacattcggtccctcgtgtgtgttatgctggacctggcgtcctcccactaccctcggtgtcgcgcttaggtcatcctcacgcttcggtgatactcccttgttgaccatgtcctcgacgaccccgtcgttccgctgtcaccttcgtgggtacagatggacaacgtgatcctctcgtggctcaacgacaccatcaccatcgagctacaagacatcgtccgtgactaggcgaacaacgcgtaccaggcgtggctcgctctcgagggccagttcctcgggaatcgggaggctcgggcgctccatctcgacgtccagttccacctgttctctcagggggatctctctgtgggagagtactgccgccagatgaagggcatgacaaactctctccgcgacctcggcgagcccatcgccggccatatcttggtgctgaaccttctacatggcctcagcccccgctacggccacctgaaggctttcatcaagaggatcgtgccttttcccacctttcatgctgtgccgaacgagcttctcctcgagggccccgccgatcacatctacgccgcatgaagcacgtgcagcatcagcacacggagcacatggagatcgatctgcactttgtccgtgagcgggtcaccgccggtgacgttcgggttctcagcgtccccaccaagctgcagttcgccgacatcttcaccaaggggctgccgtcgagtgtcttcgccgacttccgatccagtctcaacatctgtacaagatagagactgcggggggggggggnnnnnnnnnnnnnnnnnnnnnnnnnnnnnnnnnnnnnnnnnnnnnnnnnnnnnnnnnnnnnnnnnnnnnnnnnnnnnnnnnnnnnnnnnnnnnnnnnnnnnnnnnnnnnnnnnnnnngggggggggtgttagagtactgttagggtttcggggcttgtccctgtgtaattacttgcataccctcagtgtaatgagcttggcccatatagcactcccaactcagttagggttagggtttcattctccaacagttttgttcattatgagcacattttttgtcgacttgatttgttaatagtaagttattctgtgaaggtgctaacttttgatctgtttgggtaatatgaatgatttatagttgcatacctattataattgacgctatgtaatcttaggctgctctttatcaaactgactttcgaccagttccactggaggaattcataaaagttggtaatcaaatatttgataaagacatgaacgttgttcgtgtccttcccaaagtagctgaccatggtggcaaggatccagatcatattgttgaattgtgtaatgaggtaaatctgttatttacattgcaggtcttagtttttctctgttaaacactacaattttgaagcaaattgaatattgtacttgtatttgttccaggttgttcttcagggccattctgtgcttttgttttgctccagtcgtaaaggctgcgaatcaactgcaaggcatgttgccaagttcttgaaactaccctctgttggaacaactgatgttagttcggagttttcagatgctgcagctgctattgaggccttgaggaggtgccctgctggattggatccaatattgggagaaacccttccttttggtgttgcatatcatcatgctggtcttacggtatggaagctatcttctatcttcataagatacacaaaatatcaaatatatatatatatatatttatttatttgaaatttgcactgctaaatatgtgctaagtggtgagagtggtctcactaagccaccaggtcgcgggttcaaagcaaccccttcacatttgcgggggaagggttgccttggttttatcccttccctagaacttactcacatggcctccgtcactgggtctgccctttacactgctaaatttaataaagtgatgccatttttacctaaccacagctgggcaaagggtggtaggaactgatctgccattacctgttctgattgatccaatgagcgtcatcgccttctgttctgtggcaggtcgaggagagggagattgtggaatcatgctaccgtaaaggccttgtccgtgttctgactgccacttcaactttagctgctggtgttaacttgcctgctagacgggttatattcaggcagcccaagataggtcgtgattttattgatgggactcgctatagacagatggctggtcgtgctggtcgaactggaatagacacaaaaggagaaagtgtaagctacaatatctttgttccactttattctattagagaatggttctgacatttcactagttctgttttaattgtgtttttaactttagcctaccccaactgcttgggagaaaagggctttgttgttgttgtctaataatctgacatttgaaatgcatgcagatacttgtatgcaggcctgaagaggtcaagagagttacaggtattattagaagcaattgccctcccttggagtcctgcctctcagaagataaaaatggaatgactcatgcaattatggaggttgttgctggtgggattgttcaaactgcaaatgatattcatcgttatgtgcggtgtacgctgcttaattccacaagaccttttgatgatgtcgtgaagtcagctcaagactcccttcgttggttatgccataaaagctttcttgagtggaaccatgagaccaagatatactccgctactccccttggtagagctgcttttggaagttcactcaaccctgaggaatcattggtagcatacttgtcttttgctccttcattattttattgcattgagaaagggcctctagctgagttggttaggtggtctgagtagcactccttaggttctaggtttgactttccgtgggagcgaatatcagcctgtggttacctcccatttgtctgtcccacaccaaagcacaggtctaaggtcctgtctagatcgtagtcgtttctcaaatgggctacggtgccgctgtgtatgggtggggcaggggttcgggggttttctcgacctgcgtgagaaggtcttcttaatataatacccgagggctgtcttatcccccgcaggtcgagttttttttttattttattgcattgtttaatcttgcatttttctgtttctgcactaggttgttcttgatgatctttcgagggcaagagaaggctttgttctggcatctgatttacatttagtttacttggtcacacccataaatgtagaccttgaacctgattgggaattatattacgagaaattcatgcaactttcttctcttgagcaggtatgcaagtcttcttttgtcctattgcacttgaaagttcatttatcaaactgtaaatagaatatccagaaattcgagttctatctgtactcattagaaaatagttgaaagtgaattccgaaaacatgattttagttgctgttgaactaaatgtgtgaagcaaaagtgaattcagaaaatgcaaatcaaatttgttacggttataatagtcataatattagtgtaatcttctagtctagggtttccctcatgtttctcatgtactcttatagtgcttattcatccaattcagtgcttgttaatggaatgtgtgaagtctatttcggtatttttacataaccatgaatcagactaaaacatgcatatgtttattgaactccttcgcactgtacttggttgcagtttactacatatgttatttgacctggttcataagatttttttaggagttgtcagttcttattagttttttgtaattcccatgttttctttggcccaacaagaaacagaacaactgacatgataccatgttttctgcagaacattaatcttttatcagtggtattatcattagtgccaaaatgtttataactgtatgccatgtctaccctactaaggcctaagactgtgtccaacactgttttgcactgttcacagagtggagccaaatgtgttcgcttgactttaatccgtaccggcttctattgtttctacagtatttttgtctgtatagattgcagctacagcagtccaaacagttggctttaatctgcagtagctacagacccttttggacttgcgcactgctcatgcgaaaagtggatgcgttactgttcatgtcgggtcctgggtttgttaagacagatattagattagatcgggttgacttgttggctatttctttaactctagaaaatagttaaggatcaaatctacacatctctattgggattgtatctactttgaattaagtaagaaatagatagttcaacagttcctatctggctatctacctccttaacactggctttctcgcatggccaacatgaagtatgcctgtgacaccgtatctttctgccatattggttgagaaatcaaaccattacttaaattatcaacttcagttcagttcatagaacacataatttcactcatttttttaatttctgtttgttttgttggtacaatgcagtcagtaggcaatcgggttggagtaattgaacccttcttgatgcacatggctcatggggcgtcgataccttttcgtgcaaggcctcagagaaacaccgggttaagtaacaagtctgcacaagctgctggaaatactcttgttagtgagcacacaatcagagtgtctaagcgcttttatgtggctttaatgttatcgaggcttgctcaggtataatctaagaactacttagacattgcatgttagttctatgtcaatgcatagtgctcaagatcgctagaaagcctaagtcgtgaaatgtaaaaaatagttcaatagagattagataatgaaggttgaaatgttctctcattatatatggctaattaaaatattagctcatgtcttatatttttgtagaatacacaagagagctatgtatcatttcattgagaagggtataaataaataagttacaacacacccaccacactcacacatatacacatacaaacttgtactggaaacaattcacaacacacccaacatgccttttgcatcagaacaagacccttgggtgggcatttggggaactaaaaatttgtgggtactagaaattgctacccaatttcgagtttcgacctcgaaaaagcattagccaaaattttagatacttgataatttgagttccagttttacttggtgtacctgataattccagtagcattttaaagtaagaaacaaaagtccatcaaatcatttcatatcaattaacaagaaatcaattatcaagatagtacaaatctacattgagccataccaaataatagatttacactatactgaaccactccatatcttcatattagaaaatagaagaacaaaatttttgagatattttgcgtaattcgggtataaatttacccaaactacctgaatggaattcagttttctatagctactattacgaagatggtttccatggtgacctgctagatgggctatatgggcgactcagtttgtgggaatcttatccaaggtatcaaaggtgggacgacaaccactcgaccagccgtgtttccacctgtgaattccttcacgatatgcctgccatctatggctatggcctcgcgccacctcccttttatcaaaccacgcgagcaacgtccctcccatcgggttttcaatgtttatactcgtttgtcaaaaaggaaaatgctctcttgctcagtttcttggcaacatggactttcaagaaaattttcagacacctttttggctctttctatggaagccaccgaagaatacctcaagttctatgatacaattatttcagttcaaaacaacatgcaaggcaaggataaatggatctattcttggggaaacaacaatctacgttcaagcaagatttacatattaaacttacaatccatgtacccaccttctcctttcaagtggatctagaaatccaaagtgagtaaaaagatcaaggtgctcatttggctgaccttcagagacagaatcaactcaagaaattttcttcgaagaaagatgtgtacaattacaaatgatgattacaaccatgttctttgtggccttaattgtgaggaaaccacatatcatcttttatttgaatgtccattcagtacattgtgctggaatcatgttggtattcactgggatcaccctttggatttttttgaaatgaccatatctgcgagggatcaattcagtaaaaatttcttcatggaaattctggctgttacgacctgggagattttggaagcaaagaaatgctgctatcttcatagattcctttccatcttttacgtcttggaggttttgcttcaatgacacgttggggctacaaatgcatagaatgaactcgaatcttagcttgtcgatttccttgtggcttgcttctttattttctttacttctatctccatttgcttctattcttccttccctttactgtacatttccttttttatttaatatataccactgtatgggccttccctacagtttcatcggtcaaaaaatgtccctccaatgccctccctactgccacagtctaccatgccacaggttgttgcagcactaccatgcgctcccaccatatcttgcccaatttcatgtgtatttacaagaatttactggtataagttgctgagaaagtttgggttacacagtttgacccctgagccaggacatacatccttcctagactggtgggaggagtcttctgaagaagttcatgggatggttaagaaaggtctgaactcccttatcatcttgggggcctgaatgatttggaaccattgaaaccgatgtgtctttgatggactgacttctagtctttcctcgatccttgtgtagactgatgatgagagaagggcaactttggttaaagctgtgctcactgctattcccatttatcatctaattgctttgcaatgtccaaggtgggtaatcaaggcaatagacaagattcgcaggggttttctttggaaaggaagaactgacattagaggaggacattgtgtcgttgggtggtccaaggtctgtcgtcccctctctcttggtgggttgggaattcacaatttggaagtnnnnnnnnnnnnnnnnnnnnnnnnnnnnnnnnnnnnnnnnnnnnnnnnnnnnnnnnnnnnnnnnnnnnnnnnnnnnnnnnnnnnnnnnnnnnnnnnnnnnggcccccccgcgctgcaagtatttcatttggcttgcatctctcaaccgatgttggacggctgatcgactggcacgtcatggaatggatcatccagatagttgtcccttgtgtgatcagcaggatgagtcagtgcatcacttgctggtggattgtgtttttacgagggaagtttggtttacaacactaagcaggctaggtttgcaacatcttgctcccacgtctgatgctacaaggtttcaagattggtggagtgaggcagaaagacaagtgtctaagcataagaaaaaaggtttcaactctattgtaattttagtagcttggcagatttggaagcatagaaatgcgtgtgtgtttgacaatgcttccccaaacattcacgcaattttgctgtccatccatgatgaggctttattatggggtcttggaggggctgctgctcttaggcaggtttggttgtagtttgatttttggttttttaattttcgggggtgctttcttggcacctttgtactgggtcttttctagacccttttttcttatcttcttaatatatattgatgcgtggttctcccacgtgttcgagaaaaaaagatgatgagagaagaatatgggaattagctggggccaggggtctttccttcttggcaacacctcttcttgaggtctaacccccctggctctttagtgggtagtgtgagtgtttttacatggatcctttcatttatgcgtgctgttggcctctatagggaggttttttcttgtaacccaggtcttctttagaccttcctttccctaatatatttaaagcttagttcccctgcgcttcctagaaaaaaatatctcgcccaattctcatgcaccaaattcagttcccaacatcgtcttggctgattctaggatggtttgacacattatcgctggccttggtggactacattgccgctgcccatgcagtgtcgtgcttccacaagcttgaatttcattcatacgaatgattgacgtagtgtgagtagttcttccatggctaacacaccttggaggtcgacaagtcgtatcacctattcgaacatgacacgagcacactatcgtggatcgaattcaaggacctttgcaacttgtgtttttggcccccaattcgcaacaaccgcgttgacacattggctcgtcttcgattcttgaccaagatgcaagaataccaagatcatgtcatgccaacaagcgaagttgttcgctatgggatttccaaaatatatcaatcttgacatgaaattgtgggagccccaaaatcttcatataaaatcttcatataatcctatcatgatggcacacactgaacaaccatgaccctagtgtgcgttgtggcacactgaccaaccatgaccctaatgcacaatcagcactgatgctgaactccaacgaggaccactccaatgacaagcacatggacgagcaacaactctagcgttgcacctactctgtctattaacatcaatcgagttgtctaatcatcggaaacaagggttttgtcataattgtgatgagcaatacattcatggccatcactacaagtgactcttctacactgacgttgtcaactatcaggattatattaggtggctatgttgttgtcctcagtgtggccttcctgcgcatacttgcctcgtgttctagcggtaccagtgccacgtcttatgaaggggcattaggtctacatgcgcaagaagtctagctatggttaacgactccgtcaacaccacaaactctaggttcatggaccatctcctcaacatataagttgatctttttgctgaaacaagaggactttatcggcttggcgctgccaccactgcatgcacctgctactaaggacaactctagtagatgtcaatccatacatatacccacaactctagaagaataagctccatgctcgagaacaacatccaactgagtacattagcattgttgggccttgatgcttctcatcaagaaggttggcaactcatggaggttctgctttgactacagtgtgttgaattggaagacagtgaaggataaattttcgatcctgatggtcagtgagctactcgatgagccacccaaaattctttatctagctcgacctttggtcaggctaccaccaagtccacatctaccctgacaatgcgaaatgatgtttcttacacatcatggccacttcaagtttcttgtgataccgatgagcatcgccatcgcactagccacattcaacaacctcatgagcgacatgcttcgatagttgctttgctggctcgtccttgtattttttgatgtcatcctgttatagaacatttcttggatggagcatttgcaacatgtcaaggtggtgtttgatgtgctatgtgcgaacaagttgttcatcaagtggtccaaatgccacttcggtgtgttgttcgtctcctaccttgaccatgtgatctcggtgtatggcgtggctgtggatggcgaaaaggtggaagttgtggcatcgtggccacaactgtgatccactagggaactctgttgattccaagtatcgcgggtattacaagaagtttaacaaggactttggggtcatcgtagcacctctcatgaagctcttgaatgagggtttaggtggtgccaagaagcagaagatgccatgcaggggactcaatgggctgctatcaaccgcacctatactgcagttgttggcatttgacaagctgttcacggtagactgtgatgcgtcgagttgagtgcactaaggcgccagagcattgtcattctttagtgtaggtccttcgtagctcgacatctcaaggtggtagcctacgtgtgtgatacgattggcatggtgtaggcggtacaacgttggaggcatgggcttggtgcaggcggtacaacattggagtccctacttatggggttgaagccgatatggcattggagtccctagttacggggcaccattttctgcgcttaaagttcctgctcgatcaaatacttatcaaccccaacatcaatggatcaacatgctctttgactttgatttggttgaagtgtataagtggattgcctagcttctcccatcagcttaagcttttgggttgaactggttagtgtgtccactctaacatggtatcaaagccagaggtctcgagttcgaatcctgacagagacttaatttgtgcctccacccatttatttccacgtttgcgcgtttctctttgtctgcgtttgcgcctttctctctggctacacgtgagtggggggtggtgaagtgtataagtggattgattaccttctcccattagcctaagcttttgggttgaactggttagtgcgtccactctaacatggtaacagaaccagaggtctcgagtttgaatcctggcagaggctttatttgtgtctctacccatttatttctgcgtttgctccttttccatcagcttaagttttttgcgtccactctaacatatttcatagtgaagttttgggcaagcggaacacacttgctgacaccttgtccaatctcctattgtgacattgagactgtaggcactctcaagaccctcgttctagctctataacgacatttgccacgaggtccagacacagtgagttgggcgatccttggcggatacacgatgtcctcatcctccacgacaactagatcttcctagacacatcctctagcttgttgttcacttctttggagatcgcacaagacaagtgtccataaaaacgctcaagtgcctccaagtggacttttatattgctcgaggccgcaaggtggtctgttattttgtgaaagccttttcacatgctagaggaacaaaatagaaactcttcacctgtcgggactgctctagccattgctggtgatgttgaaggtttggaagggtgactcccttgacttcatggaaggccttccaagggtgcacgagaagtgtgatcctcacagtcaccgaccatttttctaagtatgcacatttcattgccctcgttcaccacctatagattgtggcatcggttgtgaaggcgtcattcgatggtttttatggcttttctagcatccattgtaagcgaccaggaccccgtgaaaggtaacttttggctggacctcttcaagatggctggtgtgagcttcgtataagcatagctttccatctacaaactttttttttcctcgaacagcgcaggagaactgcgcgtcatttcatttaaggaagaaagtaagtacaaaggtcaagagtgacccgaaacacaaacaccaacacacacacgccatccctcaaatacaaccgtcgcgccacatcaatgaagaaggcgaccacaacctacagggctaaaaaagcaccagtaggcaccgacccaaaaacaagttcctggagtttggaagctccagccaaacaccacagccccccttccacattaacagcttttagcacttcctcaacacatggcctagaattgtcaaagacacacctgctgcggtgcttccaaatctcccaagccactaacataattagtgaattgaggcctctacgaagccccttaggaacagcagcaacagttctcttccaccaacctgggaaccgagacactagaggtggtgaatagaactattgcaatgtacttgcagtgcatcacgggagataggtcgtgcacatggctggaatgactgccatgggaagagtattgatacaatacatccttccaaatcacgctcgaagataggcgccactgcccttggtcccattcacagtgcgcaccacgcgaactcaagcagtgcagatggcgctttaggagcgtgaccggtttttggcagagctctatgaatgactggttcaagcccaatatcacgggaaacgctaatacaataagcaccatcgcaaactagagttcgagatcggctcttgggtgtggccatgaacaggttgctgaaaagtgtctctgataccaaagatgatttgtctggattgttggctttattgatacaatgacaaggaaatcatcctgaccgccctccctaggaggctctggtcataataactcacttcttgctaaacccgtaatcaacattaggtttacagataaataggcttagaggttagctgttagagaaaggtatatgctgttgcaaaagatgatgtcttgcattgagctcttagatgatttatacagagtacatggcgtaggaggtaagacaacccatggatacatatggcagtctatgaagtataatatctagactatcaaatatactctaacacatgtggcagtctactagacaatatctagactaccaaatatactctaacactaaccactcccctagaatttctcttttttcctattgttcctcctagacttccaactaagctccatgcagacaactacggaaaaactcaacaaacttgacaactaattaggcgtggctgttagccacatggtgttgtggacgctggcttgttcttcttgtggcgagtatagacttgctgataagcgtccacaacaggttgttcgtgactgctggtgtgttaactctactatgaaaatatctatgtgcagtatgaagaagctaagctatttggttcagaactgaacctgtattcagtcttagcaactctactcatcaccctcctctagttgcaacccaatagagtatttctgatatgtctttcatatcatatgcattttgtacaagcagattagattatgtccaagttgtgtattgtaatgattttaatgtaagtttgtcttgtaatatagtctttaggaattgttccttgtggtattatttattatctgtttcttcttgtcttttgtttgtttatcttttattccaagttggggtgttcccatcttgtttccttgaaaagattgtactgttctcatgtaatgcttctttcaggagattcctattgctgatgtttgtgagacatttaaggtcgccagaggtatgattcaggcactgcaggaaaatgctggcaggtttgcttcaatggtttctgcattttgtcaaaggcttggttggaatgatttagaaggccttgtttcgaaattccaaaatcgtgtctcttttggagttagggcagagattgcagaactgacatcaattccatttgtcaaggtgtgctttaattaccatgcatatatgaattatctaagtgtctctggatcttatttcagtatggtcatgtaaaatatgaaatagggttcacgtgcaagggctttgtacaagtctggtctgcgtactcctgttgccattgctgaagcatctattcctgaaattgcaaaagctctttttgaatcttctgcttggtctgggcaaggtactctttcacgtattcatggtctgattccttactactcttttttatagtacttgttttgatgaggatataaatactatagctgaaatcctgtcctgtacagtcaaggattttccttgtacttatcttgggctacctctcacaattggcaaacccacaaaggaggtcttgctgccataattgaaaaggtggcagaatttttgctgggatggaaggcttctttaatgaactgtgcaggcagattggtaatggttcgagtagtgttaactgctgctcctatttaccttttgattgccatggatctaccaaagtgggttctaaaagccatcgacaaaaggaggggtctcctctggaagggccaggaacaagctaagggaggtcactgtttggtctcttgggaaagggtgcaacagcctctggaatatggtggtcttggaattcataatctggatctgcttggctgcgcgttgcagattcgctggttgtgggctgagaaaactgatcctagtaggctttgggcaggcctccccgctcaagtccctcgcaatgcttaggccctcttcaacattgcagtggacatcattgttgggaacggtgagcaaacactcttctggacagacagatggctggatggccataccatatctgaagtggcacccagcttatttagtgctgtctcgaagcggacagccaagaggaggacggtagcccaagctctccaaaaccaaaggtgggtggatgacatcaaaggagcactcacagtccaggttatattcgagtatctaaagattgtcgcatggtggatggtctgtttttgcagcaagatgtgccggaccaattttgtgtggaaattaacacaatccgacatttacacagcatatagtgcttatttcattggcaccatcaaatttgggccatggagaagaatatggaacagttgggcacctcctcgctgtaagtttttcatttggctggtgttccataaccggtgttggacggttgatcgccttgctaagagaggcttgccccaccctgatgcgtgccagctctgtgatcaagatgatgaagacattcaccatctcttggcctgctgtgtttttgctagacaagtatgagcaagcatctttcttcagtcgggccatactgccttggcgccatatgcttcaacaatctgtttttcaaaatggtggtggacagtaatctcaactgttcctaagaaaatgcggaagggtctaaattctttgatcattttggtcgcttgggaactgtggaatcattgtaatgcttgcttgtttgagcaacataggcccaatgttcaggaagttcttagggctgttagggatgaaggtagtctctagtgcagcgctggagcaaaaaagctccaagagctaatggtcacggtgttcagtctgggggattaggagcttgttgaggttcctttccctggccgcctttcttttttctcttctgtttgggttttagcgtctccagggtgggaggcgtgatgtacagtgggtgtgggtgaggtgttcttgtatttatttttggcattcctgcctttcttctaccttaatgaaatgttgcgcagctctcttgcgttgttcgagaaaagaaaagatgcacaaattggtttctcagttacttctggatatattcagtaataagcttgcagatactttattgtttgttttaagcctactctaatgtcaatctgttgaattgactaggtgattctggtttacgacgaatgcaatttggtgtagcaaaaaaaataaaaaatggagcccgcaaaattgtcctggaggaggcagaagccgccagagtagcagcattctcagctttcaagtcacttggtgtggaagttccccagttcactgcacctccactcgcagctattgaggaatatccaactcacgataccatagaccaagctaagttaaataagctagcttctggtacccattctagagatgataaaaatatgaatacttgctctgattatgctactccaagggcttctacatacagtctaagaaaggacacaagtcctgctccttccattcaaatgaaagagaatgcaggactatctaaaaatgtgcaaatcactagacagggagcatcatcatctttgtcaacagaaattgctgatggatctagtagagatgtggctgaaaaaggtcctgtccatgcatataacttcccagggggatttgattgttttcttgatcaatggtccacagctagtaattttttctttgatgttcattttatcaagagatcgatgaaaccatctttgaacctttttgaagtttttgggttggctgtctgttgggaaaaatctcccatatactactgcaacttcccaaaagatctagtcactactggcaacaataacatcaaggaaatgtggggtaattttcagagaagatgggaaaaaatagcggacattatgaaacaaaagagtgtccaaaaaatgacatggaatttaaagatccagatccaggcacttaaatcaccttatatttcttgccaacggcttgaaaggtttcatcttgaccataaaatgctggacaaagttgaagtgcttaacaactcatatatgttgttatcaccagtctctgtctacaatggattggatatatgtctgctggcgtgggttctatggccagatgaggaaagcagagcggttccaaatcttgagaaggtatttgatatatgtcgtgttctgcaatatctttagcttttcgttgctgatgcattgtcacttcatgtacattttttatattcgtttttttctgaactttgcaaaagcaatatgagtaggaattttagttgataagagcctcaagaaccgtgtgttggatatgaaaatgcaaggaaataggattattcatatagggcatgatgagaatgctaagagactttttaggaagacttagatgtcatgtttacaactatacctatcagtaagaaacttttcataggagatctcaatgggcatgtaagtacaacaagtgtaggttttgaggtgtttcatagaggcttccccaagcttcacgtctcagacaatgtttcttgaccaagtgggtttggctatgacatgaagctaagaaacattgtctggtcatgtccactttggagcgtaccgctcgtttacgctctcgaatctgcttccttaaagatggtgataccaattccatagctatgttttctggtcgcccgaccagctagtcgaactgggggatcgaccagcgactaatctcgattagtcgtcgactaggtccgactaatcgagctctggtcgacctggtcgtcctgttcatccaggagaccaggacctatgtatatactatataatatatactattatactatatagtaaataattatataactatatagtatatatgaacttcatatactatattatgaaggatagggtaaacatgacatgaattcagcaatactgaaaagtgaaaacagcatagaaacacttctagttattaatactacaagtcccagataccagtaccacacaacacacattaatactacaagtccaaaaaaaaatctaggtcctaaacctagtcgcccagaaccggctaatcgagcgactaatcggccctaatcgtcgactagtcggacgaccagggcgaccaggtactctagtcgagtcgactgcctaatcgagctctgctaaccgactagcccgactaatcgcgactaatcgcgattagtcggacgacttgaaaacacagttccataggcatgccagtttccggaaacaaaagaactttattgggaagttggtggttgatgatcagattttcacctcgcaagatgagaaacagaagcttgatggtatcttaattgcggatgcaagaggagacttatctttcagttatatcttttggtcgaacaatgtgcttgacaagtggagtatagtggtactaatctacacgagtaagggaaatatttaaagttgtatcaattaccaagtaattaagttgatgaaccatactatgaagctatgtgagagagttatcgagcattgtttgagaggaataatgaggatctctatgaaccaatttggtttcatgtccgaaaggtcaaccatggaagttattttcttaataagacaagggatgaagcagacagggagcagaaggacctacacatggttttgttgacttggagaagacttatgacaatatactaagaaatgtcatgtgttggtttttggacaaacataaaatctcaaggaagtatgttgtagtcattaaagacatgtgttcgaacaagggatggagacacaaataacttttcgattagaatatgactacatcaagggctggctttgagcccttatctttttgccttggcgatggatgaggtcacaagagacatacaaggggataccccttggtgtatggtttttgcgcacaatgtaatgctagttgatgaaagccgagcaagagtaaatagaaaactagagttgtgatggaagactctagagtctaaaggtttagactcaatagaacttaaactagagtatatgagatatgacttcgacactactgcacatgactacatacggaaagagatcttagtttggaagtttaagtagtgcttaggaaggatatcttttagtatttagaatcaatgctatagaatgacagggtattgatgaaaatgttagccatagaatcaaagtagggtggatgaagtagtgtcaaccatatgatgttctatgtgacaagagtgtaccacagatgctaaaagacaagttttaccaaacgatgattatacctgctatgtagtatggtgtagaatgttggcctataaaaacacattttcaatagacaagaagggattgagttcgaatcatggaatggtgatacacatgataagctaggggtagcaccaattgaagaaaatcttgtctaacacctgttgagatggtttgtaccatggtttttaaagcggtaaggcgctccaaggcgttggaccaccgcctagacgcctaggcggcgcctaggcgacgcctaggcgaggtaggcgggcaaggcgcctaggcgtcagaccaccgcccggacgcctaggcgtcgcctaggcgacgcctaggcgacgccttaaaaacagtggtttgtacatgtccaacagagaactccattagcaccattgtgtagtgacgcgctaataatgggaagagagatggagaaaggctaaagttaatatggaaagaggcattaaaaggagtcaaagatttagtcttgaataagagtgcatggaaaatagctatccatgtgcctgaaacttgacttatggtttatgttgggtttcaacgctagcctatcctaacttgtttgggattaaaaggatttgttgtttcttgaatacgcaggaggtctgcgtatttttatattaagaagaaaaaaggggggggggaccccaaaacagaaacaacagttttacaaactcacaccaccattaacgcctaagacaactcctctaaaaggatttgttgttgtttgcaatagcaatacacagctgttaattttgatgctgacctatttctgataatatattacttttgcattttactttgtgataaacagtttgtcaagaggcgacttcatagtcaagaagccgctgctgcaaatcgcgatggaagatggagaaatcagatgcacaaagcagcacacaatggctgctgtagacgtgctgcacagacacgggctttgtatactgttctgaagaaattacttactcaaaatctttctgttttggttgaaacaatcgaggccccattggtacaacacctattcttacttaatactctctccagttataacaaaagtgtcattttgggttgcctgcagttaatttgtttatactttgatgctttggattgaatatctgaaaataacgcaactagattcttcctggaaagtagttcaaaatataacaactttgttatagtttcatacattttgtagcaatcgaatcatcctattagtacccatgttggtatccaaaattacacttgtgatcggaatacaatattgctgcttgtattatgcttggatatctcttatgcatttattttgacaggttaatgttcttgctgatatggagctttggggaattggcgctgacatggatgcttgtctccgtgcgaggcatattataacaaaaaagctgaaggaactagagaaagaagcttacagattggcaggcaagaatttctctctaaatgctactgctgatatcgcagacattctatatacacacctaaaattgccagttccaaaaggctgtgagaaagggaagctgcatcctagcactgacaagcagtctttggaccacctaaggtattttttcattttccttgttagttctgacatcaaacatgttatttctagttctttggaagtacttgtgtgccactttatgtccgtgcattatggatggaaaattttaaatgtgttagcatatctagtgtctagtcactgatggtctattggtagttttgtgtgagtaaaggtaaattattatgttgtcttgatcagagctagaaaagtgcttgtggaccaccggccacatgttattggcagttaatctctggacatgcttttagaatatcattgtgctaatatgcactctttttctgttttttttggagtcaattaacaggattaactcatttttcatccctaattaaatacacgcatgcatgttcaaataatatcttcaatttggaaaagcttatgccaaagagaagcacatgtatcactgctttactgtattttcagtatataggctgctgctgatgtccttattgtatgcactcggaagatcggtagcaaggcaacactacaacagccttgccaagctggtcttcctttcgtttgaaatctatggcactcttttgatttcacttggccccaaattttcctcgacataaaattgccgtggctttatagtttactataaaatccttatcaactggacataatgctctctttaggcttctattaattatcccagtaatgtaggagaatttaatttgaccattttgctaaaatatttttgaattcttctgtttcctcagggatcaacaccccattatcccattaattaaggaacacagaacattagcaaaactgttaaatggcacgttgtggtccatttgttcacgtgctcaattgtgcactcaatcacaaaggtacatcatacatggaaattggcttcagacgtcaactgccactggccgtttgtccatggaggagccaaatctgcaggtcctttagttgtaataaatgctttgcatgttttgtttggatttcagttattgagaaataacctactgacttaacctgttactatgtagtgtgttgagcatgtggtggaattcgatacagggaaaagcgataaagattactcaagcatgtcagttgatgatcatcataaaatcaatgcccgtgattttttcatacctaccaaggtttttctcatttcacttttatgtatttattaagttttccctttaattaggacagttgactattttcctgtaacaacgctttatttaatatcatgatttacttattttgtaggagaactggttattcataactgctgattactcacagattgagttgcgtttaatggctcacttttctaaagatcatatgttggttgaacttctaaagaaacctgatggtgacgtttttaccatgattgcttcaagatgggctgagaaagaagaggccttgatttcttccaaagagagagaaaacactaaaagattcatatatggcatcctttatggaatgggtgcaaactcccttgcagaacaacttcagtgcagcactgaggaagctgcacagaaaattcaaagctttaggagattttttcctggtgtttcctcatggttacatgaagttgtgttatcctgtcgccaaaaagggttagtctacttggtagcaatttctgtttagtctttctttttatataatattgctcctttgatttttgatgctaacattgaatgagctctgtgaaaaatatgttagtcttaacttttgtggtatttcatatctgaacttttgagatatttcatatttgagcatgtattatcatatctttcaatgttagtatgcgagctgcttctcataataatttaaggtgaatatgcttcatgataatttgattttatttgaatgttaagtttatacagtaaatgataaggattactgtcttttggtcatgttatttatataacgactacttaagatcagagctcctttatctgttgggttgacatatgcacttgtagcccatattgctcatgagattgtatatatattgtcgtatccactactagcggtcttacgaaaccccaaggttactaaagccatggattagagtttgggataactttcaaatgcactcatgattcaattttctttttacctggtttgtgccgatcagaattaatgtctgcgcccttcttcagtttgttgtggcctaacttgtgaaacccttgctatctcacaacttccatctgttagacaatttattttcttccctagttacgaggatttcttctctgattatgtgccagcagttgtttcctccgtacgtagctgtccttgattaggtgtggacaattggttccttcctccctggctgtttccttttagcgcccagatcatctccccgattattgtttccatgaaatcaggtggagcacgttctggtagaggcctattgttctcctgctatttagttgaatataagcaacatttcgcgctattatggcatcaagagattgttacgatcccgtgagaactcgcttttggtaatacttgcttgcccacgtcgcctccccgatgttgtgccgtcatgccacctagtgaccctctgcccgttttccggtgaccaacaacataccgaggatgcagccacataggagaaggcctgctagatccttatcgttgctgccgatgaggctgtcaaggccgtcactgccgcctaggatcatggccgcacaacccaggacgctctcgcgagggaacgctaggctgctaccggtctcaagcgtgctaaggccgctgctcgtgacgctgccttccctcctctcaacgacgaccctgatgatgacgccgacgctagtgaagacttcaattatgaggccgctaccgcctccaacctccacgtggaggccgtgggcgtacagaacctccatgcccttgtgcctgtggttctggacatcctctccacccactacagtcgctgcgggatctcgtcctcctcgccctcgagcggtatgccgtcgccgaccatgtcctcttcgacgccctatttgtgccatcctatcgacgcatggacatcgtcgtcttgtcatgggtgttgtgcacgctctccctgagtttgagttcgctcgcacccccggcggcacaacacaccacacctggatcgttgttgaggagcaattcctcggtaatcgtgaagctcgcgcccttcatcttgacgccaaattctatgtctttatgcatggtgacctctctgtcggtgactactgccacaagataaatgggatggctgacgctctcggtgatctcggagtggttgttcgtggccgcatcctcattctcaacgtgctacacagcttgaacgagaaattaaaccacatgaaggtccactttcatgcactccaagctgctaccttccttcgtctgcaacgacctcatcctcgaggagattgactacaacgcatcaacaccgccaccagcagccgcccttgttgctgtgcatggcctttcggtagctctgcttcccctagcgtcccctcttctgggggcttagctgcgcccctgtcccacccacggcgccctccggtagcatctccactggtgccgacagctattagtagctaccgtcgtcgttgcgacaacggtggcgttgaaggcaaggccatggttccctagcctttgatctacaactcgtggaccgagttagtcaccatgtggcctggccccacatgtgggccacaagaccgtggtggccaaacgccgcgcgcgcccatgcctcaggccacgcaacaacagttgacaacaacatgactagttcgtggtcatgtcgtttggcttgaggaatgcgttaacatcattctagtcccccttgagaattgaatagcactcctagctgacaccatggactcatcgcactcttcatgggttgcttggcctcacgggcttctaccgcttcttcatcaacaactacgacatcatcaccacaccatgaacatccctcaagcgtgttgccttccagtgtgctgatgtggcgactacatcctttgaggccttcaaggcggccctcacctatggactggtgctgcagttgttgagcatcacggcttcgtccatcatcgattgcgattcttcgggcattggttttggcgtgctcttgcccgatcgccttgtttagtctgtggatggagccccagcctaccaaacttgccacctaagagcgcgagctcattggccttgtgaaggctgtgcggcactagaggtcgtatgtctgggaccggccagtggagatagaagattgggtccctaatgatttctcccctactagaatactgcaacagaacctttgaatcttttagtcctgaacaagttgtgcaggctagtttcgaaatgcaacaagggaccacaatatcgatgatacagctaggcatacatcaaagaagtttctaattcgttatcactcctcagatttgttgagactttattaggccggcgacgtgttcttacaaaaataacggctggcaatagcaaagagaaagctaaagcacagaggcaagcagtaaattctatttgccaggtaatatagcattctcacatagttttagatggttgattttattgattatatgattaatatgcatgtgtttccagggttctgctgctgatattattaaggtggctatggttagagttcattcaataattactaacagaactagtgcaactgattccacagatgaagttacaaggaaattttcagaacttggtggccagtgtcaccttattttgcaggtgttttaagacttgcattgcatgatacttattttcttttgacttttgctcagtttggctctaaatatggatgaatgcaactatatatttttcatttgtaggtgcatgatgagttggtattagaagttgatccgtgcatggtagcacaggctggaaggttgttacagatatgtatggaagaagcagcttcactattgggtatcagttttaatctaaacttcgatagttatcttatgttcagtctttgggagcatcttgaaaaggtctttaaaatttacctgctaaactaatagttatgccaagtgaacaaaatgaataggaagttctatttctgccgttctccaatagttaggttcttaaaactaacaacctgggcaggagggtatggggggagcacgcaaaaactgcggaggaggaggcacaaatagtagatatgacnnnnnnnnnnnnnnnnnnnnnnnnnnnnnnnnnnnnnnnnnnnnnnnnnnnnnnnnnnnnnnnnnnnnnnnnnnnnnnnnnnnnnnnnnnnnnnnnnnnnnnnnnnnnnnnnnnnnnnnnnnnnnnnnnnnnnnnnnnnnnnnnnnnnnnnnnnnnnnnnnnnnnnnnnnnnnnnnnnnnnnnnnnnnnnnnnnnnnnnnnnnnnnnnnnnnnnnnnnnnnnnnnnnnnnnnnnnnnnnnnnnnnnnnnnnnnnnnnnnnnnnnnnnnnnnnnnnnnnnnnnnnnnnnnnnnnnnnnnnnnnnnnnnnnnnnnnnnnnnnnnnnnnnnnnnnnnnnnnnnnnnnnnnnnnnnnnnnnnnnnnnnnnnnnnnnnnnnnnnnnnnnnnnnnnnnnnnnnnnnnnnnnnnnnnnnnnnnnnnnnnnnnnnnnnnnnnnnnnnnnnnnnnncccccccccccccccaaaaaaaaaccaaaaaaagggagctgttctaagaagcccatggagatgctctaaccaaggtaaaactgaattggtgtttgcttttatttcagtacctttgcgcacaaagataaaggtgggaaaaacttggggttcactagaaccattctatcctgagccttgttgatgcaaatggttaatgtcagttggatgccaatgtttcacgacatgcaaggtcctggaagaaggctgaacaatttccaatatgccccacagggaccttggtaaatcctactcttttttatagaagattcaccccctgcagagttaatctcatgaggcctgctatttgccactatcgtttcttgttctgcattgtccatgtatttaactgatgcataccttgaaccatatatgaccatatatccgtgtgtggctttgctaatcttgtattttgaatttagtttacattttcatcttcacggtctctttgaaacttcaaatgaatcaggtgattctgtctggtgttcttcggtagaaccttcattgctatgtctacagtcttctgtcattgctgaccgtatgtgaaatcaacgcaacagcgaccagctccattactgaggatttgctatggactggtgattatcattatgattccatgtggcatgcaagaagcatatatatatatatcaccaatagatgctgttaaagggtttaaggtgtatttgaaaggtcttcctagttatactgcgaatcttttagataaacccttaagaaattggagggcctagtatatggtgatttttcttttgctaggtccagcgctaaaaaaccgattatggggtttattcaaagatgaaatttcatcctgtaactacaggttcaaggtgtatttggtttgatggatatcactatggacaagcgatggttggtttttgtacaagttggatgttgataaaaatgttggtatccatgccacacaaaaaaagcctaaccagcacccatattttgtaatccttgtcaagtatgttatatggtttacttgatagctctagcgaggctatccagtacctcaccttcaccctcatatttgtaatccttgtccacataattattagtatgttatatggttatttagtaattacgatggaaatatta

SEQ ID NO: 23 - DNA, 152 bp, Artificial Sequence
  marker ma61227s02
gcccagcaattcaaaagaaaccgaacacccttccggaaattccctctggcaatggcgtcgggctcgtctcgcccccaaatcgacyaggtaaaaccctaacctagttcctcgcctattcacttcgtcgcctccaagcgctaattcttcctgcg

SEQ ID NO: 24 - DNA, 72885 bp, Artificial Sequence
  genomic DNA of mutant pol theta (c->t at position 221)
  misc_feature (5583)..(5733): n is a, c, g, or t
  misc_feature (31155)..(31650): n is a, c, g, or t
  misc_feature (44470)..(44479): n is a, c, g, or t
  misc_feature (45143)..(45152): n is a, c, g, or t
  misc_feature (46993)..(47109): n is a, c, g, or t
  misc_feature (53299)..(53398): n is a, c, g, or t
  misc_feature (71287)..(71733): n is a, c, g, or t
gcccagcaattcaaaagaaaccgaacacccttccggaaattccctctggcaatggcgtcgggctcgtctcgcccccaaatcgaccaggtaaaaccctaacctagttcctcgcctattcacttcgtcgcctccaagcgctaattcttcctgcgttccggctccatctcagttcttcccggccaagaagcggaggccctcgtcgcggaagggcgagtcgccgtgacccgggacgcagcatgagagccccggcggcgccaaggggtccctggaagggtacctcgtccgttcgccttgcaaccgtgccgtggcagcggcatcggtggtccccgtgggctcgcccaggggcggggacccgggcgccaggcgtagcctctcggccgcaatggatgtcgacgtcggttcctcggcttcggtggctgcggcggcaggtgacggggcagactttgatctcaggaggagcacggcggatttcttgtcccattcctgcaggtgagcgcgcacagtgtgaaacataaggggagttatagtattggttccaataactgttattttgcaagttacgggtctaattttgttgttccagtgctatcctgcctttgaggggtgactgtgattacagcgagcagtgccagatgaagcagaagcggagtgcgtcccagtcattcttggttccttgtgacaacgactatgtcaagaagcagcgagttgcccattgtggtggctttgaagctctaaaggttggatcaagatacactatccatccatctttagcatcgtcatatgataagtgatttcatgagtttcaactcttagtttggttctttgcaggagttagatgataatgtagcttccatgaagcaatgcatcaatcaccatggtggctcagaggctgtggaggtttagttatgcctgaacaagtcaaacctggaaccgtttctttgttttcctcttttccttttgaacttctcattatttccttttcatcaggaatctgttgagggggaacatgtgagttgtgttgggttttcggccttgcaaagatgtagctttaccccaagtactgcacagataaaagttgggttttctctagcacctgtggaaaccctaaagtctgtatcgaggaattcccttacttcacctggtgaggagttctggaatgcagcaattgaactcgctgatgggatatctgcccaggctgataaggtccgtggaaggccagaatttgatgcagcagaagacaagtcatcttgtgcagtagcagcattctttaagactcttcctagatcaggaagggatgagcttgactgtcaaaacacagtaggcagcaatgatacacatcatatagagaaattgtcaaataaagttgaatcactggcagtaaactgtcagcatataattagctcacctttgcctgtgaagcagctagatttctttcatgaggatgatattaaagtttcaggttcaaaatttgaaacaaaaggcagctatgaaacttgtaatgcacaagcagaccgtgttccactgaaaggcagtggccgcctagaaaaggaaaatctcatggaccctgtggatgtgatgaagagaagtgctattaatttgcacactgattctgcagccatgagatgtcagggtgttttcaagtcaacaactgaagggaaggttcatccaactcaagaggctggaagagattctaatcttattaggagagatctcaatcagccaacccacaatgaaaataaatcacttgctgcatattcaaataatcgcaagacttggatagattccaagagtaaagttgcttctcaggaagtggaagctagcacacctactagctccattcctctaaaggatcactcaaagatatcaagttggcttcctcctgacctttgtgctatatacatgaaaaaaggcatttcagagctgtacccttggcaggttaaggttcttttctctaattatctatttaatgaatctctggcagctagccttctttcgtctggccatttttgcctatgtatttttttctccagccatgcaaactaccactgccctctctactagtaggattaccaattatttttgctcgtaagctaagcttctttagtatttgtatcgtaataagtatgtcttgaaaactagtacttagtatatcaagtgctgagatggtttgtacatgtccaatagagaccttttagaggcaccagtgcatattagtattataaaacattaaaacgtgatagtaatgggaagaggtagggaaaggccaaacttgatatggaaagatgcaataaaaggagacttaaaatgatgaaatatatctaaagatttagtcttcaatatgattatgagtgcatggaaaacaactattcacgtgcctaaccttgatttgtggcttgtgttgggtttcaactctagtctacactcacttgcttggtactaaaaggctttgttgttattgttgattcatataaaatgctaagtcttctcttgtattgctgtcatcacattcttttcacgtttttaatgcgtttttgcttcatttttctcgaatattgtaatgctctcctagatctgtctgaaggcatgtttggtttgtgcccccactatgctaaaccaaatttggcaatagaagaaaccatgacatggccttttgtaacaccccgtccaatccctggaccggcggtacttactcctggtagctctctagaatcatatattgtccccacagaccaacacaagtcttttatgcgcactttgtcctcactcatgcgcacccgagaaaacttcccagtcggtcacccatcccaaattgctccaagccaagcacgcttaacttggaggttcttttgagataggcttcctaaaaagaagatgcaccttgttgatatggttactctattaattctattaagccttgggccaggatatcccatcccaggggccaggatatcacaattcaccccccttagaagaccgatgtcctcgtcggtcaaccccaatccaggaacctcccctcttagccacgtctgtgtgtctagtgtcgtcatatgccatgccatgtgaccactctgggcccacatgcgccatgcgccatatacccaaaccacctagcccacacacgcccgtgaaacatcgagggtcggctctgataccacttgtaacaccccgtccaatccttagaccggcggtacttactcctggtagctctctagaatcatatattgtccccacagaccaacacaagtcttttatgcgcactttgtcctcactcatgcgcacccgagaaaacttcccagtcggtcacccatcccaaattgctccaagccaaacacgcttaacttggaggttctttcgagatagacttcctaaaaagaagatacaccttgttgatatggttactctattaattctattaagccttgggccaggatatcccatcccaggggccaggatatcacacctttaggcaggtacaagatttgaattggattattggagccaaataaatttacataaatatctacctaactaaaaggaacaatgtttcttgttgccccttccacccaatgataggtggacccaaggtaatcctgcgtctcttatgtcaggtcagcactctctcgctaagagccatttgttcatgattgaatagccaagtgagatggccaccatcctcgaggtcatgttttcggacctaggatgtcaggccgaatgtgttctggttcttggagttgtattttgtttcttttaatataagccgttcggttgcataggccaaaagagcagtttgaggccaaatgaaattttagcggcgagagctgtctcactgagttgtgagtttgaagcagtctttccgcatttgcgcggggggggggtgatggaataagtcttgagcatctagaggacagcctgcttttgactgtcctctgtagtcctttagcatctagaggacaacagtcgctttttgactgtcctctgtagtctctttagcatctagaggacaacaatcgcttttgactgtcctctgtagtcgctttagcatctagaggacagcagtcgctttttgactgtcctctgtagtctctttagcatctagaggacaatcctgttgtgtagtgtgtgtgagaaggtgtggtagtgcagcccctagggctataaatatgtgtccccaacctctctaagggtatgacattgtgtagtgtttgaggaaataaacagaaaattgccccaactcatagtgtcatcctcttgatgagagttagagtccctctacttacaattggtatcagagccaaactatcctgcagcctaaacatatcgtgctcatctccttctcgcgtctctccccacactcagtcggcagcaagagctccaactgttccttcctcccctgctcagacgagcagcctttcgtctgagacagcctcttccacacgcagcaacccctcactagcccaccatgtccctacgctcggccacttcgagtgcgcggcgccagcaggaggccgaggtcgccgcggcacaagaacgcgagcgagcagcagcagcggctgcagcgacagcggcgagggcagcacggttggcggcggcggaactggcagcggcgagagcggaagtagaagcagcggaggcggcggatgctgcacgtgcggcggcaacagagctcgaggttctgcgcggcagtagagctggcagctctgcttctgtcgacgacaacaccgacgaagagctcaggctggcgagggaagcagcgcgagagcaggcggcatagtgggcagccgcgcatccccatgggggcgcgcgtggcggcagcccggatacgcgctgacggcgctctaggcggaggcgcacgcggcggcagcccagacgggcgtagacgcgccggcggtgctcccggcggcggcgaccgagtcgacggagatcgcggcctctacaggcggcgcggttctccctccccggatcggtaccatggtcgccgcatggcccaggccattgtcagggacatcggtcccggcggtggggggcctaccctcaccaagaccaactacgtcgagtgggccgcggtgatgagggtacggctccaggttcgccacatgtgggaagcagttcgttacgacgacgtcgactaccacgaggatcggcgggcgctggatgctctcattgctgtagtcccgcccgagatgcagttttcgctttcccagaagcggactgccaaggaggcctgggacgccatcgctgcgacccgcatcggcagcgatcgtgcccgcaagaccacactgcaggcacttcgcaaggagtgggagaacctggccttcaagccaggtgaggatgttgatgactttgctctccgcctcaacactctgttgcagaagatggtgcagttcggcgacgacacctacgatgaggagagagctgttgagaagctcttccgttgcatccccgagaagtacaggcagattgctcgctcgatcgagtctctgctagacctctccacgatgacgatcgaagaggcgattggtcgcctcaaggtggtggatggcgacgaaccacaggctctctctgggcctatcactatcggcgggnnnnnnnnnnnnnnnnnnnnnnnnnnnnnnnnnnnnnnnnnnnnnnnnnnnnnnnnnnnnnnnnnnnnnnnnnnnnnnnnnnnnnnnnnnnnnnnnnnnnnnnnnnnnnnnnnnnnnnnnnnnnnnnnnnnnnnnnnnnnnnnnnnnnnnncagggtgacaagaagaagggggagtcctcctcctcgacacgaggccgcaaacgcggcaagccgcgcaagccgcgtggaggcgcccaggccggggcgcgaggacatgctgagggtggtgcacgtggaggtgcccaaggcggcgccgtcggcaacaagaagccggcacgcgacgacggctgccacaactgcggcaagcttggccactgggccagggattgtcggcagccacgacgtggccaggccaacgtcgcacaagcagaggcggaggaggaggccctgctcctggcacatgcaagcatcgagccatctccagcggcaccggccgcagcggcactcctccaccttgatgagtcgaaagcacgcgctttcctcggcgacggctccaacaaggacatgatcgaaggatggtgcctcgacaccggcgccactcatcacatgaccggccgacgggagttcttcaccgagcttgactctagcgtccgaggctccgtcaagtttggggacgcctccggtgtagagatcaagggcgccggctcagtcgtcttcaccgccacgtctggtgagcacaggctgctcaccggagtctactacatccccgcgttgagaaactctatcatcagtttgggacagctggatgagaacggttcgcgcgtggaggtcgagcacggagtcatgaggatctgggatccctctcgtcgccttcttgccaaggtacgcaggagtgcaaatcggctttacatcctcaatgtgaaggtggcacaaccttgctgccttgctgctcgtcgagacgacggggcatggcagtggcacgagcgcttcgggcaccttaacttcgaagccttgaagcggctcagcgccaaggagatggtacgaggcctgccgtgccttgaccatgtggagcaattctgcgatgtctgcgtgttgacaaagtagagactgctccccttcccccagcagtcgagcttccgagccaaggagaggctcgagctcgtgcatggggacttgtgtggcccggtgacaccagccacaccaggaggacgacgctacttcttgctgctcgtcgacgatctctcccgctacatgtgggtgatgatccttggcagaaagggagaggctgcgaacgccatcaggcgtgtgcaggtcgctgcggaggcggagtgcggccgcaagctgtgatggaataagtcttgagcatctagaggacagcctgcttttgactgtcctctgtagtcctttagcatctagaggacagcttgactgtcctctgtagtctctttagcatctagaggacagcagtcgctttttgactgtcctctgtagtcgctttagcatctagaggacagcagtcgcttttgactgtcctctgtagtctctttagcatctagaggacaatcctgttgtatagtgtgtgtgagaaggtgtggtagtgcagcccctagggctataaatatgtgtccccaacccctctaagggtatggcattgtgtagtgtttgaggaaataaacagaaaattgccccaactcatagtgtcatcctcttgatgagagttagagtccctctacttacaattggtatcagagccaaactatcctgcagcctaaacatctcgtgttcatctccttcccgcgcctctccccacactcagtcggcagcaagagctccaactgttcctccctcccctgctcagacgagcagcctttcgtctgagacagcctcttccacacgcagcgacccctcactagcccgccatgtccctacgctcggccacttcgagtgcgcggcgccagcaggaggccgaggtcgccgcggcacaagaacgcgagcgagcagcagcagcggctgcagcgacagcgacgagggcagcacggttggcggcggcggaactggcagcggcgagagcggaagtagaagcagcggaggcggcggatgctgcacgtgcggcggcaacagagctcgaggttctgcgcggcagtagagctggcagctctgcttctgtcgacgacaacaccgacgacgagctcaggctggcgagggaagcagcgcgagagcaggcggcacagtgggcagccgcgcatccccatgggggcgcgcgtggcggcagcccggataggcgccgacacgctgacggcgctccaggcgggggcgcacgcggcggcagcccagacgggcgtagacgcgccgacggtgctcccggcggcggcgaccgagtcgacggagatcgcggcctctacaggcggcgcggttctccctccccggatcggtaccatggtcgtcgcatggcccaagccattgtcagggacatcggtcccgacggtgggtggcctaccctcaccaagaccaactacgtcgagtgggccgcggtgatgagggtacggctccaggttcgccacatgtgggaagcagttcgttacgacgacgtcgactaccacgaggatcggcgggcgctggatgctctcattgctgcagtcccgcccgagatgcagttttcgctttcccagaagcggactgccaaggaggcctgggacgccatcgctgcgacccgcatcggcagcgatcgtgcccgcaagaccacactgcaggcacttcgcaaggagtgggagaacctggctttcatgccaggtgaggatgttgatgactttgctctccgcctcaacactctgttgcagaagatggtgcagttcggcgacgacacctacgatgaggagagagctgttgagaagctcttccgttgcatccccgagaagtacaggcagattgctcgctcgatcgagtctctgctagacctctccacgatgacgatcgaagaggcgattggtcgcctcaaggtggtcgacggcgacgaaccacaggctctctctgggcctatcactatcggcgggaagctacatctcactcgggagcagtgggaggcctgccagggtgacaagaaggagtcctcctcgacacgaggccgcaaacgcggcaagccgcgcaaggcgcgtggaggcgcccaggccggggcgcgaggacatgctgagggtggtgcacgtggaggtgcccaaggcggcgccgtcggcaacaagaagccgacacgagacgacggctgccacaactgcggcaagcttggccactgggccagggattgtcggcagccacgacgtggccaggccaacgacgcacaggcggaggcggaggaggaggccctgctcctggcacatgcaagcatcgagccatctccagcggcaccggccgcagcggcactcctccaccttgatgagtcgaaagcacgcgctttcctcggcgacggctccaacaaggacatgatcgaaggatggtgcctcgacaccggcgccactcatcacatgaccggccgacgggagttcttcaccgagcttgactctagcgtccgaggctccgtcaagtttggggacgcctccggtgtagagatcaagggcgccggctcagtcgtcttcaccgccacgtctggtgagcacaggctgctcaccggagtctactacatccccgcgttgagaaactctatcatcagtttgggacagctggatgagaacggttcgcgcgtggaggtcgagcacggagtcatgaggatctgggatccctctcgtcgccttcttgccaaggtacgcaggagtgcaaatcggctttacatcctcaatgtgaaggtggcacaaccttgctgccttgctgctcgtcgagacgacggggcatggcagtggcacgagcgcttcgggcaccttaacttcgaagccttgaagcggctcagcgccaaggagatggtacgaggcctgccgtgccttgaccatgtggagcaattctgcgatgtctgcgtgttgacaaagtagagactgctccccttcccccagcagtcgagcttccgagccaaggagaggctcgagctcgtgcatggggacttgtgtggcccggtgacaccagccacaccaggaggacgacgctacttcttgctgctcgtcgacgatctctcccgctacatgtgggtgatgatccttggcagaaagggagaggctgcgaacgccatcaggcgtgtgcaggtcgctgcggaggcggagtgcggccgcaagctgtgatggaataagtcttgagcatctagaggacagcctgcttttgactgtcctctgtagtcctttagcatctagaggacagcttgactgtcctctgtagtctctttagcatctagaggacagcagtcgctttttgactgtcctctgtagtcgctttagcatctagaggacagcagtcgcttttgactgtcctctgtagtctctttagcatctagaggacaatcctgttgtatagtgtgtgtgagaaggtgtggtagtgcagcccctagggctataaatatgtgtccccaacccctctaagggtatggcattgtgtagtgtttgaggaaataaacagaaaattgccccaactcatagtgtcatcctcttgatgagagttagagtccctctacttacaattggtatcagagccaaactatcctgcagcctaaacatctcgtgttcatctccttcccgcgcctctccccacactcagtcggcagcaagagctccaactgttcctccctcccctgctcagacgagcagcctttcgtctgagacagcctcttccacacgcagcgacccctcactagcccgccatgtccctacgctcggccacttcgagtgcgcggcgccagcaggaggccgaggtcgccgcggcacaagaacgcgagcgagcagcagcagcggctgcagcgacagcgacgagggcagcacggttggcggcggcggaactggcagcggcgagagcggaagtagaagcagcggaggcggcggatgctgcacgtgcggcggcaacagagcttgaggttctgcgcggcagtagagctggcagctctgcttctgtcgacgacaacaccgacgaagagctcaggctggcgagggaagcagcgcgagagcaggcggcacagtgggcagtcgcgcatccccatgggggcgcgcgtggcggcagcccggataggcgtcgacacgctgacggcgctccaggcgggggcgcacgcggcggcagcccagacgggcgtagacgcgccggcggtgctcccggcggcggcgaccgagttgacggagatcgcggcctctacaggcggcgcggttctccctccccggatcggtaccatggtcgtcgcatggcccaagccattgtcagggacatcggtcccggcggtgggtggcctaccctcaccaagaccaactacgtcgagtgggccgtggtgatgagggtacggctccaggttcgccacatgtgggaagcagttcgttacgacgacgtcgactaccacgaggatcggcgggcgctggatgcccccattgctgcagtcccgcccgagatgcagttttcgctttcccagaagcggactgccaaggaggcctgggacgccatcgctgcgacccgcatcggcagcgatcgtgcccgcaagaccacactgcaggcacttcgcaaggagtgggagaacatgaccttcaagccaggtgaggatgttgatgactttgctctccgcctcaacactctgttgcagaagatggtgcagttcggcgacgacacctacgatgaggagagagctgttgagaagctcttccgttgcatccccgagaagtacaggcagattgctcgctcgatcgagtctctgctagacctctccacgatgacgatcgaagaggcgattggtcgcctcaaggtggtcgacggcgacgaaccacaggctctctctgggcctatccctatcggcgggaagctacatctcactcgggagcagtgggaggcctgccagggtgacaagaagcagggggagtcctcctcgacacgaggccgcaaacgcggcaagccgcgcaaggcgcgtggaggcgcccaggccggggcgcgaggacatgctgagggtggtgcacgtggaggtgcccaaggcggcgccgtcggcaacaagaagccggcacgagacgacggctgccacaactgcggcaagcttggccactgggccagggattgtcggcagctacgacgtggccaggccaacgtcgcacaggcggaggcggaggaggaggccctgctcctggcacatgcaagcatcgagccatctccagcggcaccggccgcagcggcactcctccaccttgatgagtcgaaagcacgcgctttcctcggcgacggctccaacaaggacatgatcgaaggatggtgcctcgacaccggcgccactcatcacatgaccggccgacgggagttcttcaccgagcttgactctagcgtccgaggctccgtcaagtttggggacgcctccggtgtagagatcaagggcgccggctcagtcgtcttcaccgccacgtctggtgagcacaggctgctcaccggagtctactacatccccgcgttgagaaactctatcatcagtttgggacagctggatgagaacggttcgcgcgtggaggtcgagcacggagtcatgaggatctgggatccctctcgtcgccttcttgccaaggtacgcaggagtgcaaatcggctttacatcctcaatgtgaaggtggcacaaccttgctgccttgctgctcgtcgagacgacggggcatggcagtggcacgagcgcttcgggcaccttaacttcgaagccttgaagcggctcagcgccaaggagatggtacgaggcctgccgtgccttgaccatgtggagcaattctgcgatgtctgcgtgttgacaaagtagagactgctccccttcccccagcagtcgagcttccgagccaaggagaggctcgagctcgtgcatggggacttgtgtggcccggtgacaccagccacaccaggaggacgacgctacttcttgctgctcgtcgacgatctctcccgctacatgtgggtgatgatccttggcagaaagggagaggctgcgaacgccatcaggcgtgtgcaggtcgctgcggaggcggagtgcggccgcaagctgtgatggaataagtcttgagcatctagaggacagcctgcttttgactgtcctctgtagtcctttagcatctagaggacagcttgactgtcctctgtagtctctttagcatctagaggacaacagtcgctttttgactgtcctctgtagtcgctttagcatctagaggacagcagtcgcttttgactgtcctctgtagtctctttagcatctagaggacaatcctgttgtatagtgtgtgtgagaaggtgtggtagtgcagcccctagggctataaatatgtgtccccaacccctctaagggtatggcattgtgtagtgtttgaagaaataaacagaaaattgccccaactcatagtgtcatcctctgatgagagttagagtccctctacttacaattggtatcagagccaaactatcctgcagcctaaacatctcgtgctcatctccttcccgtgcctctccccacactcagtcggtagcaagagctccaactgttccttcctcccctgctcaaacgagcagcctttcgtctgagacagcctcttccacacgcagcgacccctcactagcccaccatgtccctacgctcggccacttcgagtgcgcggcgccagcaggaggccgaggtcgccgcggcacaagaacgcgagcgagcagcagcagcggctgcagcgacagcggcgagggcagcacggttggcggcggcggaactggcagcggcgagagcggaagtagaagcagcggaggcggcggatgctgcacgtgcggcggcaacagagctcgaggttctgcgcggcagtagagctggcagctctgcttctgtcgacgacaacaccgacgacgagctcaggctggcgagggaagcagcgcgagagcaggcggcacagtgggcagccgcgcatccccatgggggcgcgcgtggcggcagcccggataggcgccgacacgctgacggcgctccaggcgggggcgcacgcggcggcagcccagacgggcgtagacgcgccggcggtgctctcggcggcggcgaccgagtcgacggagatcgcggcctctacaggcggcgcggttctccctccccggatcggtaccatggtcgtcgcatggcccaagccattgtcagggacatcggtcccgacggtgggtggcctaccctcaccaagaccaactacgtcgagtgggccgcggtgatgagggtacggctccaggttcgccacatgtgggaagcagttcgttacgacgacgtcgactaccacgaggatcggcgggcgctggatgctctcattgctgcagtcccgcccgagatgcagttttcgctttcccagaagcggactgccaagaaggcctgggacgccatcgctgcgacccgcatcggcagcgatcgtgcccgcaagaccacactgcagacacttcgcaaggagtgggagaacctggccttcaagccaggtgaggatgttgatgactttgctctctgcctcaacactctgttgcagaagatggtgcagttcggtgacgacacctacgatgaggagagagctgttgagaagctcttccgttgcatccccgagaagtacaggcagattgctcgctcgatcgagtctctgctagacctctccacgatgacgatcgaagaggcgattggtcgcctcaagggggtcgacggcgacgaaccacaggctctctctgggcctatcactatcggcgggaagctacatctcactcgggagcagtgggaggcctgccagggtgacaagaagcagggggagtcctcctcgacacgaggccgcaaacacggcaagccgcgcaaggcgcgtggaggcgcccaagccggggcgcgaggacatgctgagggtggtgcacgtggaggtgcccaaggcggcgccgtcggcaacaagaagccggcacgagacgacggctgccacaactgcggcaagcttggccactgggccagggattgtcggcagccacgacgtggccaggccaacgtcgcacaggcggaggcggaggaggaggccctgctcctggcacatgcaagcatcgagccatctccagcggcaccggccgcagcggcactcctccaccttgacgagtcgaaagcacgcgctttcctcggcgacggctccaacaaggacatgatcgaaggatggtgcctcgacaccggcgccactcatcacatgaccggccgacgagagttcttcaccgagcttgactctagcgtccgaggctccgtcaagtttggggacgcctccggcgtagagatcaagggcgccggctcagtcgtcttcaccgccgcgtctggtgagcacaggctgctcaccggagtctactacatccccgcgttgaggaactctatcatcagcttgggacagctggatgagaacggttcgcgcgtggaggtcgagcacggagtaatgaggatctgggatccctctcgtcgccttcttgccaaggtacgcaggagtgcaaatcggctttacatcctcaatgtgaaggtggcacaaccttgctgccttgctgctcgtcgagacgacggggcatggcagtggcacgagcgcttcgggcaccttaacttcgaagccctgaagcggctcagcgccaaggagatggtacgaggcctgccgtgccttgaccatgtggagcaattctgcgatgtctgcgtgttgacaaagcagagacgactccccttcccccagcagtcgagcttccgagccaaggagaggctcgagctcgtgcatggggacttgtgtggcccggtgaccccagccacaccaggaggacgacgctacttcttgctgctcgtcgacgatctctcccgctacatgtgggtgatgatccttggcagaaagggagaggctgcgaacgccatcaggcgtgtgcaggtcgctgcggaggcggagtgcggccgcaagctgtgatggaataagtcttgagcatctagaggacagcctgcttttgactgtcctctgtagtcctttagcatctagaggacagcttgactgtcctctgtagtctctttagcatctagaggacaatcctgttgtgtagtgtgtgtgagaaggtgtggtagtgcagcccctagggctataaatatgtgtccccaacccctctaagggtaatggcattgtgtagagtttgaggaaataaacagaaaattgccccaactcatagtgtcatcctcttgatgagagttagagtccctctacttacaattggtatcagagccaaactatcctgcagcctaaacatctcttgctcatctccttcccgcgcccctccccacactcagtcggcagcaagagctccaactgttccttcctcccctgctcagacgagcagcctttcgtctgagacagcctcttccacacgcagcgacccctcactagcccacgatgtccctacgctcggccacttcgagtgcgcggcgccagcaggaggccgaggtcgccgcggcacaagaacgcgagcgagcagcagcagcggctgcagcgacagcggcgagggcagcacggttggcggcggcggaactggcagcggcgagagcggaagtagaagcagcggaggcggcggatgctgcacgtgcggcggcaacagagctcgaggttctgcgcggcagtagagctggcagctctgcttctgtcgacgacaacaccgacgacgagctcaggctggcgagggaagcagcgcgagagcaggcggcacagtgggcagccgcacatccccatgggggcgcgcgtggcggcagcccggataggcgccgacacgctgacggcgctccaggcgggggcgcacgcggcggcagcccagacgggcgtagacgcgccggcggtgctcccggcggcggcgaccgagtcgacggagatcgcggcctctacaggcggcgcggttctccctccccggatcggtaccatggtcgtcgcatggcccaagccattgtcagggacatcggtcccggcggtgggtggcctaccctcaccaagaccaactacgtcgagtgggccgcggtgatgagggtacggctccaggttcgccacatgtgggaagcagttcgttacgacgacgtcgactcccacgaggatcggcgggcgctggatgctctcattgctgcagtcccgcccgagatgcagttttcgctttcccagaagcggacagccaaggaggcctgggacgccatcgctgcgacccgcatcggcagcgatcgtgcccgcaagaccacactgcaggcacttcgcaaggagtgggagaacctggccttcaagccaggtgaggatgttgatgactttgctctccgcctcaacactctgttgcagaagatggtgcagttcggcgacgacacctacgatgaggagagagctgttgagaagctcttccgttgcatccccgagaagtacaggcagattgctcgctcgatcgagtctctgctagacctctccacgatgacgatcgaagagtcgattggtcacctcaaggtggtcgacggcgacgaaccacaggctctctctgggcctatcactatcggcgggaagctacatctcactcgggagcagtgggaggcctgccagggtgacaagaagaagggggagtcctcctcgacacgaggccgcaaacgcggcaagccgcgcaaggcgcgtggaggcgcccaggccggcgcgcgaggacatgctgagggtggtgcacgtggaggtgcccaaggcggcgccgtcggcaacaagaagccggcacgagacgacggctgccacaactgcggcaagcttggccactgggccagggattgtcggcagccacgacgtggccaggccaatgtcgcacaggcggaggcggaggaggaggccctgctcctggcacatgcaagcatcgagccatctccagcggcaccggccgcagcggcactcctccaccttgatgagtcgaaagcacgcgctttcctcggcgacggctccaacaaggacatgatcgaaggatggtgcctcgacaccggcgccactcatcacatgaccggccgacgggagttcttcaccgagcttgactctagcgtccgaggctccgtcaagtttggggacgcctccggcgtagagatcaagggcgctggctcagtcgtcttcaccgccgcgtctggtgagcacaggctgctcaccggagtctactacatccccgcgttgaggaactctatcatcagcttgggacagctggatgagaacggttcacgcgtggaggtcgagcacggagtcatgaggatttgggatccctctcgtcgccttcttgccaaggtacgcaggagtctaaatcggctatacatcctcaatgtgaaggtggcacaaccttgttgtcttgctgctcgtcgagacgatggggcatggcagtggcacgagcgctttgggcaccttaacttcgaggccctgaagcggctcagtgccaaggagatggtacgaggcctgccgtgccttgaccatgtggagcaattctgcgatgtctgcgtgttgacaaagcagagatggctcccctttccccagcagtcgagcttccgagccaaggagaggcttgagctcgtgcatggggacttgtgtggcccggtgacaccagccacaccaggaggacgacgctacttcttgctgctcgtcgacgatctctcccgctacatgtgggtgatgatccttggcagcaagggagaggctgcgaacgccatcaggcgtgtgcaggtcactgcggaggcggagtgcggccgcaagctgcgcgtgctgcgcaccaacaacggcggcgaattcacgacggctgagttcgcgtcgtactgcgcggatgagggcgttcagcgccactactccgcgccgtacagcccgcagcagaacggcgtcgtcgagcggcgcaaccagacggttgtggggatggctcgggctctcctcaagcagagaggaatgccagctgtcttctggggagaggcggtggtgacagcgggttacatcctcaaccgctcgcccaccaaggctctcaacgggatgacaccgtacgaggcttggcatgggcgcaagccggcggtctctcacctacgggtcttcggctgcctcgcgttcaccaaggagcttggccacatcagcaagctcgacgataggagcaccccgggggtgttcattggctacgcggagggctcgaaggcctaccgcatctttgacccaagaacacagcgtgtgcgcacggcgcgcgacgtagtgttcgacgaagggcgaggttgggcgtgggacaaggcggtggacgacggcacgactccgacgtacgacttcaccatcgagtacgtccactttgagggagctgggggagtaggcaactcttctccgagcaggtctaccccagcccccaagtctccaccgcctccagcgccactctctccagctcctgctacaacgagctcttcaccaccacgcactccagccacgactccggctacagcgagctcttcgccaccacgtactccagcaccgacggtaccctctccgggaacgtcctctccgacaccagctcgtgtcgagcacgacccagtggagctcgtgacccctctgtcccgcgacgaggagcgcgtcgacgcgtgctacgccggcgagccgttgcggtatcgaagggtggagggccttctcatcgacccgtcggtgccaggccctgcatctcgcattctggcaggagagttgcatcttgcatgcgacgatggtgagcctcggtctttcgcggaggccgagcaacatgcggcttggcgtgccgcgatgcagtcggagatggacgcggttgagacgaaccgcacttgggagctcgctgatctccctcatggtcatcgcgcgatcacccttaagtgggtgttcaaactgaagagggatgaagccggcgccatcgtcaagcataaggctcgcttggtggcacgcggtttcttgcagcaggaggggatcgacttcgacgatgccttcgcccctgtagcacggatggaatccgtgcgactccttgcgctggcagccctggagggctggcatgttcatcacatggatgtcaagtcggcgtttcttaacggcgacttaaaggaggaggtctatgtacaccagccgccaggttttgcgatccctggcaaggagggcaaggtgttgcgcctgcgcaaggctctctacggcttgcgacaggcaccaagggcgtggaatgccaagctggattccacgctcaagaggatgggcttcatgccaagcccgcacgaggcggccatctatcgacggggcaatggagaaaatgccctgctggtgggtgtctacgtcgacgacttggtgatcaccggcgccaaggatgcagaggtggcagcgttcaaggaagagatgaaggccaccttccaaatgagtgacctggggcatctctccttctacctggggattgaggtgcaccagggagactccgggatcacacttcgccagaccgcctacgccaagcgcattgttgagctggctgggctcatcgactgcaacccagctctcactccgatggaggagaggctgaagctgagtcgcgacagcacgacgaaggaggtggatgctacacagtaccggcgtcttgtggggagccttcgctacctcgtccacacacggcctgacttggcatactccgtcggctacgttagtcggtttctgcagcgatcgacgacggagcatgagcaggctgtgaagaggatcatccgctatgttgcggggactctcgaccacggtctctactacccgaggtgccctggggaggcacaccttgtcgggtacagcgatagcgaccacgccggcgacatcgacaccagcaagagcacaagcgggatcctcttcttcctcggcaagtgccccatcagctggcagtcggtcaagcagcaggtggtggccatgtccagctgcgaggccgagtacatagcagcgtccactgcttcgactcaggctctctggctggctcgactgctcggtgatctcctcgggagagacactggagcggtggaactcagggtggacagccagtccgctctggcattggccaagaaccccgtgttccatgaacggagcaagcacatccggctgagataccacttcatccgagactgcttggcagaagggagcatcaaggcgtgctacatcaacaccaaggatcagcttgcagacctgctcaccaagccccttgggaagatcaagtttgttgagctttgctccaggtccgggatggcccaactttctcacaagacgacgcccaagacttagggggagaatgatggaataagtcttgagcatctagaggacagcctgcttttgactgtcctctgtagtctctttagcatctagaggacagcagtcgctttttgactgtcctctgtagtcgctttagcatctagaggacagcagtcgcttttgactgtcctctgtagtctctttagcatctagaggacaatcctgttgtatagtgtgtgtgagaaggtgtggtagtgcagcccctagggctataaatatgtgtccccaacccctctaagggtatggcattgtgtagtgtttgaggaaataaacagaaaattgccccaactcatagtgtcatcctcttgatgagagttagggtccctctacttacaagctgcgcgtgctgcgcaccgacaacggcggcgaattcacggcggctgagttcgcgtcgtactgcgcggatgagggcgttcagcgccactactccgcgccgtacagcccgcagcagaacggtgtcgtcgagcggcgcaaccagacggttgtggggatggctcgagctctcctcaagcagagaggaatgccagctgtcttctggggagaggcggtggtgacagcggtttacatcctcaaccgctcgcccaccaaggctctcaacgggatgacaccgtacgagacttggcatgggcgcaagccggcggtctctcacctacgggtcttcggctgcctcgcgttcaccaaggagcttggccacatcagcaagctcgacgataggagcaccccgggggtgttcattggctacgcggagggctcgaaggcctaccgcattcttgacccaagaacacagcgtgtgcgcacggcgcgcgacgtagtgttcgacgaagggcgaggatgggcgtgggacaaggcggtggacgacggcacgactccgacgtacgacttcaccatcgagtacgtccaatttgagggagctgggggagtaggcaactcttctccgagcaggtctaccccagcccccaagtctccaccaactccagcgccacactctctagctcctgctacaacgagctcttcaccaccacgcactccagccacgactccggctacagcgagctcttcgccaccacgtactccagcaccgacggtaccctctctgggaacgtcctctccgacaccagctcgtgtcgagcacgacccagtggagctcgtgacccctctgtcccgcgacgaggagcgcgtcgacgcgtgctacgccggcgagccgttgcggtatcgaagggtggagggccttctcatcgacccgtcggtgccaggccctgcatctcgcattctggcaggagagttgcatcttgcatgcgacgatggtgagcctcggtctttcgcggaggccgagcaacatgcggcttggcgtgccgcgatgcagtcggagatggacgcggttgagacgaaccgcacttgggagctcgctgatctccctcatggtcatcgcgcgatcacccttaagtgggtgttcaaactgaagagggatgaagccggcgccatcgtcaagcataaggctcgcttggtggcacgcggtttcttgcagcaggaggggatcgacttcgacgatgccttcgcccctgtagcacggatggaatccgtgcgactcctcctcgcgttggcagccctgaagggctggcatgttcatcacatggatgtcaagtcggcgtttcttaacggcgacttaaaggaggaggtctacgtacaccagccgccaggttttgcgatccctggcaaggagggcaaggtgttgcgtctgcgcaaggctctctacggcttgcgacaggcaccaagggcgtggaatgccaagctggattccacgctcaagaggatgggcttcatgccaagcccgcacgaggcggccatctatcggcggggcaatggaggaagtgccctgctggtgggtgtctacgtcgacgacttggtgatcaccggcgccaaggatgcagaggtggcagcattcaaggaagagatgaaggccaccttccaaatgagtgacccggggcacctctccttctacctggggattgaggtgcaccagggggactccgggatcacacttcgccagaccgcctacgccaagcgcattgttgagctggctgggctcaccgactgcaacccagctctcactccgatggaggagaggctgaagctgagtcgcgatagcacgacggaggaggtggacgctacacagtaccggcatcttgtggggagccttcgctacctcgtccacacacagcctgacttggcatactccgtcggctacgttagtcggtttctgcagcgaccgacgacggagcatgagcaggctgtgaagaggatcatccgctatgttgcggggactctcgaccacggtctctactacccgaggtgccctggggaggcacaccttgtcgggtacagcgatagcgaccatgccggcgacatcgacaccagcaagagcacaagcggaatcctcttcttcctcggcaagtgccccatcagctggcagtcggtcaagcagcaggtggtggccatgtccagctgcgaggtcgagtacatagcggcgtccactgcttcggctcagacgctctggctggctcgactgctcggtgatctcctcgggagagacactggagcggtggaactcagggtggacagccaatctgctctggcattggccaagaaccccgtgttccatgaacggagcaagcacatccggctgagataccacttcatccgagcctgcttggcagaagggagcatcaaggcgcgctacatcaacaccaaggatcagcttgcagacctgctcaccaagccccttggtaagatcaagtttgttgagctttgctacaggtccgggatggcccaactttctcacaagacgacgcccaagacttagggggagaatgatggaataagtcttgagcatctagaggacagcctgcttttgactgtcatctgtagtcctttagcatctagaggacagcttgactgtcctctgtagtctatttagcatctagaggacagcagtcgcttttttgactgtcctctgtagtcgctttagcatctagaggacaacagtcgcttttgactgtcctctgtagtcgctttagcatctagaggacaatcctgttgtgtagtgtgtgtgagaaggtgtggtagtgcagcccctagggctataaatatgtgtccccaacccctctaagggtatgccattgtgtagtgtttgaagaataaacagaaaattgccccaactcatagtgtcatcctcttgatgagagttagagtccctctacttacagagccatctccagcggcaccggccgcagcggcactcctccaccttgatgagtcgaaagcacgcgttttcctcggcgacggctccaacaaggacatgatcgaaggatggtgcctcgacaccggcgccactcatcacatgaccggccaacgggagttcttcaccgagcttgactctagcgtccgaggctccgtcaagtttggggacgcctccggcgtagagatcaagggcgccggctcagtcgtcttcaccgccgcgtctggtgagcacaggctgctcaccggagtctactacatccccgcgttgagtaactctatcatcagcttgggacagctggatgagaacggttcgcgcgtggaggtcgagcacggagtcatgaggatctgggatccctctcgtcgccttcttgccaaggtacgcaggagtccaaatcggctatacatcctcaatgtgaaggtggcacaaccttgctgccttgctgctcgtcgagacgacggggcatggcagtggcacgagcgcttcgggcaccttaacttcgaagccctgaagcggctcagcgccaaggagatggtacgaggcctgccgtgccttgaccatgtggagcaattctgcgatgtctgcgtgttgacaaagcagagacgactcccctttccccagcagtcgagcttccgagccaaggagaggctcgagctcgtgcatggggacttgtgtggcccggtgacaccagccacaccaggaggacgacgctacttcttgctgctcgtcgacgatctctcccgctacatgtttgtgatgatccttggcagcaagggagaggctgcgaacgccatcaggcgtgtgcaggtcgctgcggaggcggagtgcggccgcaagctgcgcgtgctgcgcaccgacaacggcggcgaattcacggcggctgagttcgcatcgtactgcgcggatgagggcgttcagcgtcactactccgcgccgtacagcccgcagcagaacggcgtcgtcgagcggcgcaaccagacggttgtggggatggctcgggctctcctcaagcagagaggaatgccagctgtcttctggggagaggcggtggtgacagcgggttacatcctcaaccgctcgcccaccaaggctctcaacgggatgacaccgtacgaggcttggcatgggcgcaagccggcggtctctcacctacgggtcttcggctgcctcgcgttcaccatggagcttggccacatcagcaagctcgacgataggagcaccccgggggtgttcattggctacgcggagggctcgaaggcctaccgcattcttgacccaagaacacagcgtgtgcgcacggcgcgcgacgtagtgttcgacgaagggcgaggatgggcgtgggacaaggcggtggacgacggcacgactccgacgtacgacttcaccatcgagtacgtccaatttgagggagctgggggagtaggcaactcttctccgagcaggtctaccccagcccccaagtctccaccaactccagcgccacactctctagctcctgctacaacgagctcttcaccaccacgcactccagccacgactccggctacagcgagctcttcgccaccacgtactccagcaccgacggtaccctctccgggaacgtcctctccgacaccagctcgtgtcgagcacgacccagtggagctcgtaacccctctgtcccgcgacgaggagcgcgtcgacgcgtgctacgacggcgagccgttgcggtatcgaagggtggagggccttctcctcgacccgtcggtgccaggccctgcatctcgcattctggcgggagagttgcatcttgcatgcgacgatggtgagcctcggtctttcgcggaggccgagaaacatgcggcttggcgttctgcgatgcagtcggagatggacgcggttgagacgaaccgcacttgggagctcgctgatctccctcatggtcatcgcgcgatcacccttaagtgggtgttcaaactgaagagggatgaagtcggcgccatcgtcaagcataaggctcgcttggtggcacgcggtttcttgcagcaggaggggatcgacttcgacgatgccttcgcccctgtagcacggatggaatccgtgcgactcctcctcgcgctggcagccctggagggctggcatgttcatcacatggatgtcaagtcggcatttcttaacggcgacttaaaggaggaggtctacgtacaccagccgccaggttttgcgatccctggcaaggaaggcaaggtgttgcgcctgtgcaaggccctctacggcttgcgacaggcaccaagggcgtggaatgccaaactggattccacgctcaagaggatgggcttcatgccaagcccgcacgaggcggccatctatcggcggggcaatggagaaaatgccctgctggtgggtgtctacgtcgatgacttggtgatcaccggcgccaaggatgcagaggtggcagcattcaaggaagagatgaaggccaccttccaaatgagtgacccggggcacctctccttctacctggggattgaggtgcaccagggggactccgggatcacacttcgccagaccgcctacgccaagcgcattgttgagctggctgggctcaccgactgcaacccagctctcactccgatggaggagaggctgaagctgagtcgcgatagcacgacggaggaggtggacgctacacagtaccggcgtcttgtggggagccttcgctacctcgtccacacacagcctgacttggcatactccgtcggctacgttagtcggtttctgcagcgaccgacgacggagcatgagcaggctgtgaagaggatcatccgctatgttgcggggactctcgaccacggtctctactacccgaggtgccctggggaggcacaccttgtcgggtacagcgatagcgaccatgccggcgacatcgacaccagcaagagcacaagcggaatcctcttcttcctcggcaagtgccccatcagctggcagtcggtcaagcagcaggtggtggccatgtccagctgcgaggtcgagtacatagtggcgtccactgcttcggctcagacgctctggctggctcgactgctcggtgatctcctcgggagagacactggagcggtggaactcagggtggacagccaatccgctctggcattggccaagaaccccgtgttccatgaacggagcaagcacatccgactgagatagcacttcatccgagcctgcttggcagaagggagcatcaaggcgcgctacatcaacaccaaggatcagcttgcagacctgctcaccaagccccttggtaagatcaagtttgttgagctttgctccaggtccgggatggcccaactgtctcacaagacgacgcccaagacttagggggagaatgatggaataagtcttgagcatctagaggacagcctgcttttgactgtcatctgtagtcctttagcatctagaggacagcttgactgtcctctgtagtctctttagcatctagaggacagcagtcgcttttttgactgtcctctgtagtcgctttagcatctagaggacaacagtcgcttttgactgtcctctgtagtcgctttagcatctagaggacaatcctgttgtgtagtgtgtgtgagaaggtgtggtagtgcagcccctagggctataaatatgtgtccccaacccctctaagggtatgccatagtgtagtgtttgaagaaataaacagaaaattgccccaactcatagtgtcatcctcttgatgagagttagagtccctctacttacagagccatctccagcggcaccggccgcagcggcactcctccaccttgatgagtcgaaagcacgcgttttcctcggcgacggctccaacaaggacatgatcgaagaatggtgcctcgacaccggcgccactcatcacatgaccggccaacgggagttcttcaccgagcttgactctagcgtccgaggctccgtcaagtttggggacgcctccggcgtagagatcaagggcgccggctcagtcgtcttcaccgccgcgtctggtgagcacaggctgctcaccggagtctactacatccccgcattgagtaactctatcatcagcttgggacagctggatgagaacggttcgcgcgtggaggtcgagcacggagtcatgaggatctgggatccctctcgtcgccttcttgccaaggtacgcaagagtccaaatcggctatacatcctcaatgtgaaggtggcacaaccttgctgccttgctgctcgtcgagacgacggggcatggcagtggcacgagcgcttcgggcaccttaacttcgaggccctgaagcggctcagtgccaaggagatggtgcgaggcctgccgtgccttgaccatgtggagcaattctgcgatgtctgcgtgttgacaaagcagagacggctcccctttccccagcagtcgagcttccgagccaaggagaggctcgagctcgtgcatggggacttgtgtggcccggtgacaccagccacaccaagaggacgacgctacttcttgctgctcgtcgacgatctctcccgctacatgtgggtgatgatccttggcagcaagggagaggctgcaaacgccatcaggcgtgtgcaggtcgctgcggaggcggagtgcggccgcaagctgcgcgtgctgcacaccgacaacggcggcgaattcacggcggctgagttcgcgtcgtactgcgcggatgagggcgttcagcgccactactccacgccatacagcccgcagcagaacggcgtcgtcgagcggcgcaaccagacggttgtggggatggctcgggctctcctcaagcagagaggaatgccagctgtcttctggggagaggcggtggtgacagcgggttacatcctcaaccgctcgcccaccaaggctctcaacgggatgacaccgtacgaggcttggcatgggcgcaagccggcggtctctcacctacgggtcttcggctgcctcgcgttcaccaaggagcttggccacatcagcaagctcgacgataggagcaccccgggggggttcattggctacgcggagggctcgaaggcctaccgcatccttgacccaagaacacagcgtgtgcgcacggcgcgcgacgtagtgttcgacgaagggcgaggatgggcgtgggacaaggcggtggacgacggcacgactccgacgtacgacttcaccatcgagtacgtccactttgagggagctgggggagtaggcaactcttctccgagcaggtctaccccagcccccaagtctccaccgactccagcgccacactctccagctcctgctacaacgagctcttcaccaccacgcactccagccacgactccggctacagcgagctcttcgccaccacgtactccagcaccgacggtaccctctccgggagcgtcctctccgacaccagctcgtgtcgagcacgacccagtggagctcgtgacccctctgtcccgcgacgaggagcgcgtcgacgcgtgctacgacggcgagccgttgcggtatcgaagggtggagggccttctcatcgacccgtcggtgccaggccctgcatctcgcattctggcaggagagttgcatcttgcatgcgacgatggtgagcctcggtctttcgcggaggccgagaaacatgcggcttggcgtgctgcgatgcagtcggagatggacgcggttgagacgaaccgcacttgggagctcgctgatctccctcatggtcatcgcgcgatcacccttaagtgggtgttcaaactgaagagggatgaagccagcgccatcgtcaagcataaggctcgcttggtggcacgcggtttcttacagcaggaggggatcgacttcgacgatgccttcgcccctgtagcacggatggaatccgtgcgactcctccttgcgctggcagccctggagggctggcatgttcatcacatggatgtcaagtcggcgtttcttaacggcgacttaaaggaggaggtctacgtacaccagccgccaggttttgcgatccctggcaaggagggcaaggtgttgcgcctgcgcaaggctctctacggcttgcgacaggcaccaagggcgtggaatgccaagctggattccacgctcaagaggaagggcttcatgccaagcccgcacgaggcggccatctatcggcggggcaatggagaaaatgccctgctggtgggtgtctacgtcgacgacttggtgatcaccggcgccaaggatgcagaggtggcagcattcaaggaagagatgaaggccaccttccaaatgagtgacttggggcatctctccttctacctggggattgaggtgcaccagggagactccgggatctcacttcgccagaccgcctatgccaggcgcattgttgagctggctgggctcaccgactgcaacccagctctcactccgatggaggagaggctgaagctgagtcgcgacagcacgacggaggaggtggatgctacacagtaccggcgtcttgtggggagccttcgctacctcgtccacacacgacctgacttggcatactccgtcggctacgttagtcggttcttgcagcgaccgacgacggagcatgagcaggctgtgaagaggatcatccgctatgttgcggggactctcgaccacggtctctactacccgaggtgccctggggaggcacaccttgtcgggtacagcgacagcgaccacgccggcgacatcgacactagcaagagcacaagcgggatcctcttcttcctcggcaattgcctcattagctggcagtcggtcaagcagcaggtggtggccatgtccagctgcgaggccgagtacatagcggcgtccactgcttcgactcaggcgctctggctggctcgactgctcgnnnnnnnnnnnnnnnnnnnnnnnnnnnnnnnnnnnnnnnnnnnnnnnnnnnnnnnnnnnnnnnnnnnnnnnnnnnnnnnnnnnnnnnnnnnnnnnnnnnnnnnnnnnnnnnnnnnnnnnnnnnnnnnnnnnnnnnnnnnnnnnnnnnnnnnnnnnnnnnnnnnnnnnnnnnnnnnnnnnnnnnnnnnnnnnnnnnnnnnnnnnnnnnnnnnnnnnnnnnnnnnnnnnnnnnnnnnnnnnnnnnnnnnnnnnnnnnnnnnnnnnnnnnnnnnnnnnnnnnnnnnnnnnnnnnnnnnnnnnnnnnnnnnnnnnnnnnnnnnnnnnnnnnnnnnnnnnnnnnnnnnnnnnnnnnnnnnnnnnnnnnnnnnnnnnnnnnnnnnnnnnnnnnnnnnnnnnnnnnnnnnnnnnnnnnnnnnnnnnnnnnnnnnnnnnnnnnnnnnnnnnnnnnnnnnnnnnnnnnnnnnnnnnnnnnnnnnnnnnnnnnnnnnnnnnnnnnncgagagctgtctcactgagttgtgagtttgaagcagtctttccgcatttgcgcggggggggggtgatggaataagtcttgagcatctagaggacagcctgcttttgactgtcctctgtagtcctttagcatctagaggacaacagtcgctttttgactgtcctctgtagtctctttagcatctagaggacaacaatcgcttttgactgtcctctgtagtcgctttagcatctagaggacagcagtcgctttttgactgtcctctgtagtctctttagcatctagaggacaatcctgttgtgtagtgtgtgtgagaaggtgtggtagtgcagcccctagggctataaatatgtgtccccaacccctctaagggtatagcattgtgtagtgtttgaggaaataaacagaaaattgacccaactcatagtgtcatcctcttgatgagagttagagtccctctacttacagggggagacttgtctcggtttatccctcccttagaccccactcatgtgggagcctccgacattggatgtactctatttgttttaaatatatgcagataaatattattttctaacaatggtgctaattcatgtataaaagtaaggagtaaaatgcatcaggtccccgaactctcaaaactaggattacgtgtcttcgaacttgacgtcttggccggtcatccaaaaccagatttgctcaaactggatgccgatgtggcgtgccatgttggagtcactttggtccccgaacttggcatgctgtatcacttgggtctcagaacttggcattttgtgccacttggcttcccgaactttctttagtacgcttcagcgtggcatgctacgttggcatcgggtttgaacaaactcggttttggatggccgactaagttcgaggacccgttttgctggttttgaaaattcgatgacccaagtgacaaatcatgctaagttcgaggaccactgatgtattttactcaaagttaagttttgggatgtgtttattgggctagggcatgctagtggggtttctctcgttgcaaaacaggggcttgtttgcaaatagttctaaaggcaccttgtgtgtgaaatgtgggttctgtgtgccaatgtcaacaagttttatggatcttgattatagatcgaattgctagaaatatagtagttcaaacagatattggaactggagctacaatttagtcattaatatactattacttcaagtatgtatgggtatcaactatcaaacataggttgtgtttgcttcagcatctgaaaagtgcttctgctctactttattgtattacaatttaactagcaccttggactatacttttggcttccaaccttttacttctccaaatggttggaaacagaaagaaattttacatgtgtatccagggcatgcttatcaagacgtccattaagcgtcacattagagtcgctttagcgctaaggcgcactcacagggcaaggcgtctagcttgccttgtgctggggagtaagacgtccgccgcggcgtaaggcgctggtggggcgtcggcagggcgttctcggagcgtcggcggggcgacgcttaggggataggtagggttttgaagggcgacggctggaaacagagaagagggtttgacctgtgtctgtgtggcagctgcagctgctgcctccttcctcgtcggcgcgcagtgctccggccatcggaggtgggagactgcggtggaagaaccgagggagagagagagaggagagctgtgggggagggagagagaggggactgaagagagatgcagcgtgagggaaaaatagaggctggcggctgctactaggttgctggcggctgtgacctaaaactgtgttttgggctgagctgggccgagttgggctggactcacttgttgtgaggttctttcctgccttttttttctgcttctactagactgaaattggacatattagaccttataaaagtgctagcttgcttattaactttaaattagtgatatataaataatgtttgatctaatttttttgatatttatctatataactaaggcctcgcctcgccttacgctttatcgcctaaaagataaaagagggttggtcgccttatgtcgccttaccgccttaataactatgatcaagggagagaaagaaaggggtaggcttcatagttgtttcaaccaaacaatttatctttttcatagtgcatagctcacatcatcttttccaaagctcacaactcacaacaacttttctatagcttagttgacccaaacaagcccataattgctttttgtttggacctaccagctaattactcatgtgagagcctctgacactaggtttgtcctactaactaactacacaacacatcataggtacgtaacctttagctctctagaaaacttgggcaagtaattcagccaccctgaaatggtgctctataaatgtctcggcttgccaaattttgtttgggccagccaaaatttgacctccaccttgggctcaactctctgaccatattgggcgcttggatcatatggaatggaaccactgtaactgttgttttattgatttttttctcgaaaagcgcaggagaactgcaccccattatattaagaccgttgtttttattgatgctaagtgtttctgaagccatgatcgtggcaggagaagagcgtcaactttggtctatgacaggggctagaggaatctcctgcttgattgtccccaaggttttgagtgcttttttagatgggacattctatgtctcctttttaatcagtgtgtttgtaactattaaatgtggtgtttgttgtgtgggttgtggttcctaaccgaatttcttcttaatataataaagtgccatctctactgcattttcgagaactttttttgacctccaagtggttgccagattgttggggcacgaccaaattttgattttgcatcctatgagtctcatactaaacgtgtcgtgaatatccttgttttatccatgatcattcatttattcatttgcttgtgccttctgtgtagacatgttttttttgcaggtatatgtgtggttgcacactcataagttgcagttgctactaccttgttagttagtctatggttttgctgctttgattgaaccaaaataaaatgttagttgcaaacttttgtcaactcagctgtgtctgtcatttgtttagtattgtcctccattatcattaaggatcagagactttgtaaatggattagtttttcatgaatgttatgatgaaaaatgatattgttctgttctttaaatatattctttgctcgcaacttatattaattgtccttgggctatgttctcatgtctattgcaggttgaatgtttacttgtagaaggtgtcttgggcaaaaggaatcttgtgtattgtgcatccacgaggtgtttgcagatctttcatgtcgttcatacatggacatacctacacacttcacattctcagatgcgtactgtttttttttcaaattccttttctatctaatcttatgtgtatattttttgttgttaaatttgcagtgctggtaaaagttttgttgctgaagttctgatgttgaggcagatactgtcaactgggaatatggcaattcttgtccttccctatgtgtcaatatgcgctgaaaaggtttttgatgatttatacagctttggattggtctgaaacatacttgtgtttgattatttatttatcttttacaggctgaacatcttgaacaacttcttgagccactgggtaggcatgtccgtagcttctacggaaaccaggggggaggctcacttcctaaagatacagcagttgctgtatgtaccatagagaaggcaaactctttggtaaacaagttgttggaggatggccgcctctctgaacttggtgtaattgtcatagatgaacttcatatggtaagcttgtctaaaaccgaagtgctgctcagaacatcctctctttgctttaaaccttttgttgttggtactttcatggttatttataccacatctattttgttatgcaagttcattgccttaggaactgtcatttcagcaatctaggtttgtgacagcattgagagtactaacgtaattttgtaacatttccattgtttgtaatcttttaatagcatgcacgagataattgccatttaatgaggatatttgttggcctgttgttagctattagtgctccttggccagtgtgcattgtggaattggatttgttttatgaaacagatggagcactagagatctggtactatctggaatctaaaaagtagagcgtgtgcattttgtatgactttcttctttaattaatacaatgatacagaactctcctgcatattgaagaaaaaacgatgtacaattgcattgcaagtagtagaggttttatcattgctaactaagagcactacaaattcttgtataggtggtgtatgtggtattggtgtactgcatatatcaatcagaacttcaaatatgatttttcctctcccccttctctccgcctgggccgttagggagtgaattcagtccaacgcctaggggctagggccaccaatctagtccaagtgatgtacctttccctactgcatcattgtttagttttttaggtgttcttttttgttcaaggtttgggatggttagtcatcaacttatcacccatcctatctaatcaagtaatcttgtgtgttactttacctgttacccgagtttccatattgttaggttataatcattaagagtaatttgtaaataagaaaggtttgtcattatggacaattgccagtaaacaagaaacaacaaggagaagtaccattggtcctggcgctgaatgaattctggcagcatacttatcaaatgcaaatcatataggaagatttgactttccttagggctcccctcatatatttgtaatattaggcccaggaccaatagtctcccagctcgccattcggctaaagcactatggcagtattactatttagcaacccctaccaaaggaagcatatagcttgcatctttacctgtctttgtttacctttccatgcccttgagggttctttcaatctttcttcctgtatcctttgacttagtttgtcgaacatgatgtgatatatagttgaaacttgttaagttctccaattatgcaattaaattaacaggttggtgaccaacatagaggatatcttttagagctgatgttgacaaagcttcgatatgctgctggtgaagggactttacagtcatgtagcggagaagtttcaagttctagcagtgggaagattgcaagtcatgggttgcagataattggtatgagtgctactatgcccaacatcgctgcggtggctgattggcttcaagtaagatatttaattctcctagttttatgtacttaatgaagggatgttttactagtgtgagaaacaacattactaacccacagaagttcaacttagcattgtcgttcatttatcatattagaaagttcaaaggcatttgataaatatgtgagcaattgaacttcctaattccacttgtattttctttcatcaactttttaaggttttttttgctgtctttcttcaaacctatagcctaacatgatatcttcatcaatattatctgatcgtatgatcgaggctactcgtatgaccaccgatcatatgactaatcactattagtcatcgattagttggtctagccagctagtcgaacatttagttgtccatgtgcctagatgacctaatcgaccatgccgagttagtatccatcgctagtctccttcgcgtcgccccacatgggcaacacgggcggaaccaaccctagcaacgcaccttcttcctcacctgattctcctcaccgtcactagagcgcgacttcacaaggaaggcaatggcatgtcattctcctctgcctcgtgatcatcgactctatcaagctcctctaccatggtttgagaaggtgctcctcccagtggccaatctctagattctagatccaccgatctctaggccagacctgcgctggttgggcctatggtggccacacagtggcagtgcagttgtcccctctcctctcacaactcttcgttcgtctttggtgggtgatgcctagatccatcgtcactgtagccggatcaggcatctcccgtgacaacggatctgcggagggcgacaacccttgtggtcccaacttcattttcaagcatgttcgggtgcttctcggctctagcactcggtcaactttggcttggcattggcatgtggcgcaaatgcaatagcaactgcattgctagcttgcatggccaccaaggatgggtgctcttagtgaggcaaacaagtgccaaacctgcaaccatgacataggagatggtgggcttgctcaggcttgcgttggtgtttgtcggtacctcaagactagggtacccactcctactggatcaaggcgggacccctgtggctatccctagtcgcatagccacaggtggtccgccctggctcagaatataggttcgtccgacgaggccgctggcctcaggtgggggccaacttccatgttgggctcttcagatccctagcagcggggctccgaagccgccacatgctccaagtatggggactccctacagctttgcctaggggcctgaccccctctgggtggtcccggacacctgcgtatgctacttgaacctccgacttaaagaggtccggtattgccacgtgtttaggcccgtgccagagggtcccggactcctctgagtaccttccgaacccccaactagtggtgctccggatctgccacgtctacagacactcctggctgattgctccctgctcgggtaaagatccggtgctgccacgtgtcttatggcgtgtgacataagccgtcgggaagagcctggcgtaagcctctggcaaggggaagggccacctgtgttcaaggcgggcagagtgcgcggctgttcacacaagtaatagatggcgcgtaccccgcattaaatgtaggtggcgtgcgcaacctgcaaggcctgcccgcgtcagaatcgcgttaccaaggcaagcccattgcgtagcttggacgcccttcattatgacttctattcctcgcgtgttattgaggcatgagggaacaggcggaggggacgggatgacaccgtccttattctccctacgctcacctacgccgcaacctacgttgtagcctttgcccacatgtcgtagcccctcctcatcttaggattagggcgggtgttatccgtcacctgtctggagtttacctctgaccgtgttgatgtttgtgtggttcgtctctaggtggtctttatagggcacgacaaccatggttggctacaacgagccttgtttgtgggcgtagcttttcacctgcaatggctctgaactagctcgagagttgcatgcggtggtggacgacaatcaacttcaccaggactacatgagtaactatgttgactacacatgttggtgtgaggagagatcttggtgcaagatttggttagtattatcttgagtcgatgatgataacacctttggggggggtgccattcccttttttggaagcgtcgatgaggtgccgtctctccttaccccacgatttgttttgaagaagctctgcctagggtccctaggctggtgatggcggcgcccagcgtcgtatcctgcctgagggcatcaccttgatcccgtactaccatggttgttggtccgcatgggacatttgctgcttgtttgtaagcctcaggttttgatgagttcgctacttgcttaaagcatgtcttttgctctcctagggtagatcaataggtgaagtcagagctgcttttgtggggtgcaacaaagcttggcaatgatgacacattatgttcacttccttcaaaagccgggtcttgttgtgagtaggtggtggtgtgttagggctttggctgatgttcgttgtgggaaatcagatctacgtatcacttttgtgggataagctcgacatcgatgacgtgtggtgtgctctgttggttgtttttgtgtatgtgggttgcttaggattagtcgtatgggttgttgtgtttaggtattggccggttttcctttgataaactgtgtgatgtggtgttttatccctgggtttccttataacctaggtcaattctatttcttaattgaaacttcctagttcctactgcgttaaaaaatgacctgatcaaccatgtatataaataaatttgatataaattggtgaatgggagaggcaagcaaccaagcacattaataacatttccaccttcctctccggcgcggacgtcgcccacctctacgcgtctagcatcgccgccgccgctactacggctccccaggcgttcaccgtgaccaccgccgctgctgcagccactgcggctggactcctacccccaacctctatagcagcctcgacctccctggctacctgacctccacggccgccttcagtgccgcctcgacattcgggactctctccccgaccgacttctcccggcagtcgcccctcggtttcaccgcccgcctgtcgtcgacgtcacttgggctccaccacgtgccgtcgcgccgtccaacgactccgccttggtcgctgccatcgccaccatccaggccgccgtggccgcctcacaggagcgccaacgcgtcgcattactccctctggagcaggaatgggccatgggttaggccctgaccactcagctggccacggctcagcgtatgcttctcggtcgtggcaccccgccaccaccggcagtgcttgcggctcccctggtggtcccggagcctcctcatggctctgggcttgacgtcgacactatcgccgccctccacgcctaggccgctggggttcacaacatacagtccctcatgttggacccgacgtcctcccactaacctcactggcgcgctcaggtggtcctcacccttcggcgtttgccctcactgaccacgtcctcgacgatctcgttgcctcgctgtccccctcctgggtctagatggacaacgtggtcctatcgtggctcaacgacacaatcaccgttgagctgcaggacatcgtctgtgatcaggcagacactgcgcgccagacatggcttgctctcgagggccagttccccaggaaccaggaggctcgggtgctccacctcgacgtccagttccatctgttttctcaggggacctctctgtgggagagtactgccgccagatgaagggcatggcgaactctctccgcgacctcggtgagcctgtcgccgacaacaccaaggtgctgaaccttctacgtggcctcagcccccgctacggccaccggaaggctctcatcaagaggaccgtgcctcaactcccgctatggtcctctcatcaagaggaccatgccgtgcggaacgagcttctttttgagtagctcaccatggagaccgaggctcctccggcatcgacactctacaacgctcctcccggcggtcagacaccctcggggggccaggcctctcgctctccatcgaccgaggcccctgctcgccatccacccgctgtcattgcgactcctcgtccggctttcaccgccgacggaggtcgtcgctccctcaagggcggccgtggggtggcagctccacccgtggtggtccctccggccggggtggcggccaggcgtgaccgtcattctacaacccctggaccaggaccatcgccatgtggccgggctaggcctcgagtgcctcccgctttccggcgtcggccctccagacagcgcctccctacgacgtgccttcgatgcctccctacggcgtgccaccaacgcctccggccgcgccctagcacccgccccgaggaccaccacctcgacgccttggtccccgctggctggcggatggggccctgcatccctcgtcaccgccttcagcaccatggcgatgaccccaccccctccgactgggtggttgattccgagcttcttaccacacaactcccactgcagacacgctctctttgtcccatcccatccattcctcccacccctcctggatcctcgttggcaacgataccactttgccggtcacctcaataggtgcctcggttttccctgggccgttctatctcaacgacgttctcgtagcccctcacataactcacaatcttctttctgttcgtcggttcaccaccgacaacttttgttccattgagtttgacccctctggttttctgtgaaggatctagccacatgacccctctcacccgctgtgacagcgccaagcccctctacacgcttcggccttccaccaccgacgcgtctccacctcccgtcctggtctccaccaccacctctaccacgtgacatcattgtctcggccacccaggacctgatgtcatgaccaaacttaacaacaatttagatccttcatgtagtaggggacattttgatggtctctgtcatgcttgtcagttagaccgacatactcgtctcccattcaccactttttggtttgaggagtcttttgacctggttcattgtgatctctgtacctcccctatactcaatctctttggttataaatactatttggtcattttggatgatttttcccattttctttggacctttcctcttcggttgaagtccgacacgttcaccaccctcacacacttcttcacctaggtctccactcagttccgtcgcccggtccgtgccctacagtgtgacagtggccgcgagttcgacaaccatgcctcccgttctttctttctcaccaacggcgtccagttgcgtctctcgtgcccctacacctctttccagaacggccgggccgaccgcataactctttctcaccatttgctgccttctcttccaggcgtctgtccctgccagctactggggtgaggccctacacaccgccacacaccttctcaactctcttccctcgaaggcggtgagccaccctactcccacttcgccctgtacgacacaaccccttcctacgaccaccttcgcgtgtttggctgtgcctgttatgctaacacttccgccatcgctcctcataagctatctccttgctccactcgctgtctcttccttggctagtcccctgaccacaaagggtattgctgtcttgacctcagctcgcaccgtatcatcatctctcgtcatgtcgtcttcgacgaagatgtgtttccttttgctggctcctcccacccaccgatctcgactccctacttgagtctgatccggttacccctctataagtagatggactctaactctcatcaagaggatgacactataagttcgggcaattttctgtttatttcctcaaacactacacaatgccatacccatctaagggttggagacatatttatagccctagaggttgcactaccacaccttctcacacacactacacaacatgattgtcctctagatgctaaagagactacaaaggacagtcaaaaagcgattgttgtcctctagatgctaaagagactacagaggacagtcaaaaagcgactgttgtcctctagatgctaaagagactacagaggacagtcaaaaagcgactgctgtcctctagatgctaaagagactacagagtacagtcaaaaaacgactgttgtcctctgatgctaaagagactacagaggacagtcaaaaaaacgactgttgtcctctagatgctcaagacttattccatcagcctccaccctaggcgtcccgccttgcgccgttgcctgtaccatgtgcggcctcgacgcctccactcgcgcctctaccggcgcggcgacgacaccgtctacctcctgctctacgtcgatgatattgtgccgacatgcaccgtcgacctcctacagcgcacgatcgtcggccctcagcggtagtttgcgacgaaggacctggggcccctccaccacttcctcggcatcaccgccgaacgctggtcccagggtctcttccttcaccagcgccagtacgccatcgacatcctggagcgggctggcatattcgactgcaagccctgctccacgcctgtcgacacttaggcgaagctctctgaggacggcggcccccggtcgccgacgcgacgtcttaccggagcctgaccggtgcgctccattacctgaccttctctaggcccgacatcgcctacaccatccagcaggtgtgcctgcatatgcacaccccgcgggagccccatctcaccgctcaagcggatcctgtgctacctccgcggctacctcgactacgacctccttctccgaccatccccgacgtcggagctcgtggtctacaccgacgctgactgggccgattgtcccgacacgcgccggtccacttccagttctgccgtgttcctgggcgccaacctcgtctcctgggctgccatgcggcagctcgtcgtctcccgctccagcgccgaggtcgagtattgcgctgtggccaatggtgtggcagaggcctcctagatgcgccagctactacacgagctccacatctctcttcagcgcacaaccctcgtctcttgcggcaatgtcagtgcggtctacctctccaccaaccccgtgcatcatcagagcacgaagcatgtggagatcgacctgcagttcgtccgcgagcgtgtcactgcctgtgacgttcgggttctcagcgtccccaccacgctgcaatacgacgacatcttcaccaaggggttaccgtcgagtgtatttttagactctcgatctagtctcaacatctgatctgtacaagatagagttgcgggggggggggggggnnnnnnnnnngcagattttaaaataaaggtgcacagatttgcttcagctctcttcgcagcctctgtgtgttcggtggttggtaatggggcaaacactctcttctggacagataaatggcttcagggccaatctttgctccagattgcccccgcgctaataaatcgggtgcccgcgaatataagacggcgcagatctgtccaagcagccttaacagccaatggttgggtgcatgatatctctggaagccttacggcgcaggtgctgtttgaatttttattggtttgggatttactccaagaggtgcaactgtaccctaatgtggaggatcaacatcggtggttgccatcctcctcggggctgtattccgccagctctgcttatttgcgcttccatggtggtgcaacaacctttgagcctgctacaagaatctggaagacttgggcccccccgcgctgcaagtatttcatttggcttgcatctctcaaccgatgttggacggctgatcgactggcacgtcatggaatggatcatccagatagttgtcccttgtgtgatcagcaggatgagtcagtgcatcacttgctggtggattgtgtttttacgagggaagtttggtttacaacactaagcaggctaggtttgcaacatcttgctcccacgtctgatgctacannnnnnnnnngggggggggggggtgttagaattccatttacggtttggggttctcctcgtgtaattactctctcacccctgtgtaatgggccatgtcctgttaactcatgtctattaatacatcacccaaccccaagatagagttagggtttcccacactgtgtaatggactaggcctaacaacctgggtctattaatacaactcccaaccctgagttagggttaggttttcccacatgtaatagaggtaggttagtttctctcccccaccccatcccaaccgcccgcttctttcccagcctccggtcgccgtcagctgcatgctctagccgttgtccgccgtgtgctcctccctgtcgtcacatcctgcagccgccgaccccgccatggatcctccccaatccgtccctcccctctccttcgcgctggatgctagcgcggacgccgggcttggtgcgacggcagccgacctcgacatgcgcgccaccgcggccctcgacgcatgcacctcgcccgcgcaccgccgcgaacgccgccgccgtgtacgccgccctaggcgtgaccccctcatcggctgatctgcacggcgccataggcgtgtgccctcccttcgctagctcgctctttccccatggctcgtcgacccgctgcgctcgctgttggcccccctacatcgacggcctcgggcccctccgcggcgcctctcctacgaccttcgctgcacaacagcgccaaggttctctgcctggcttcctcgccctcgctgctcctacatggaccgaggacgtcgcttcctcgtcaggctcctccccaacttcctcgacattggttatggatatcgccaccatccaggcggctgttgcggcctcctaggaccgtgagcgcgccacgactcttgccttggagcgcgagcgcgccatggtgccgacttgaccacccagatggccgtcgcgcaacgcctcctcctcggtcgcagtaccaccccttcaccggtggcccctgggactccccatgcccaagggcttgatgctgacaccatcattaccctccatgcttaggtcgccggggtccacaacattcggtccctcgtgtgtgttatgctggacctggcgtcctcccactaccctcggtgtcgcgcttaggtcatcctcacgcttcggtgatactcccttgttgaccatgtcctcgacgaccccgtcgttccgctgtcaccttcgtgggtacagatggacaacgtgatcctctcgtggctcaacgacaccatcaccatcgagctacaagacatcgtccgtgactaggcgaacaacgcgtaccaggcgtggctcgctctcgagggccagttcctcgggaatcgggaggctcgggcgctccatctcgacgtccagttccacctgttctctcagggggatctctctgtgggagagtactgccgccagatgaagggcatgacaaactctctccgcgacctcggcgagcccatcgccggccatatcttggtgctgaaccttctacatggcctcagcccccgctacggccacctgaaggctttcatcaagaggatcgtgccttttcccacctttcatgctgtgccgaacgagcttctcctcgagggccccgccgatcacatctacgccgcatgaagcacgtgcagcatcagcacacggagcacatggagatcgatctgcactttgtccgtgagcgggtcaccgccggtgacgttcgggttctcagcgtccccaccaagctgcagttcgccgacatcttcaccaaggggctgccgtcgagtgtcttcgccgacttccgatccagtctcaacatctgtacaagatagagactgcggggggggggggnnnnnnnnnnnnnnnnnnnnnnnnnnnnnnnnnnnnnnnnnnnnnnnnnnnnnnnnnnnnnnnnnnnnnnnnnnnnnnnnnnnnnnnnnnnnnnnnnnnnnnnnnnnnnnnnnnnnngggggggggtgttagagtactgttagggtttcggggcttgtccctgtgtaattacttgcataccctcagtgtaatgagcttggcccatatagcactcccaactcagttagggttagggtttcattctccaacagttttgttcattatgagcacattttttgtcgacttgatttgttaatagtaagttattctgtgaaggtgctaacttttgatctgtttgggtaatatgaatgatttatagttgcatacctattataattgacgctatgtaatcttaggctgctctttatcaaactgactttcgaccagttccactggaggaattcataaaagttggtaatcaaatatttgataaagacatgaacgttgttcgtgtccttcccaaagtagctgaccatggtggcaaggatccagatcatattgttgaattgtgtaatgaggtaaatctgttatttacattgcaggtcttagtttttctctgttaaacactacaattttgaagcaaattgaatattgtacttgtatttgttccaggttgttcttcagggccattctgtgcttttgttttgctccagtcgtaaaggctgcgaatcaactgcaaggcatgttgccaagttcttgaaactaccctctgttggaacaactgatgttagttcggagttttcagatgctgcagctgctattgaggccttgaggaggtgccctgctggattggatccaatattgggagaaacccttccttttggtgttgcatatcatcatgctggtcttacggtatggaagctatcttctatcttcataagatacacaaaatatcaaatatatatatatatatatttatttatttgaaatttgcactgctaaatatgtgctaagtggtgagagtggtctcactaagccaccaggtcgcgggttcaaagcaaccccttcacatttgcgggggaagggttgccttggttttatcccttccctagaacttactcacatggcctccgtcactgggtctgccctttacactgctaaatttaataaagtgatgccatttttacctaaccacagctgggcaaagggtggtaggaactgatctgccattacctgttctgattgatccaatgagcgtcatcgccttctgttctgtggcaggtcgaggagagggagattgtggaatcatgctaccgtaaaggccttgtccgtgttctgactgccacttcaactttagctgctggtgttaacttgcctgctagacgggttatattcaggcagcccaagataggtcgtgattttattgatgggactcgctatagacagatggctggtcgtgctggtcgaactggaatagacacaaaaggagaaagtgtaagctacaatatctttgttccactttattctattagagaatggttctgacatttcactagttctgttttaattgtgtttttaactttagcctaccccaactgcttgggagaaaagggctttgttgttgttgtctaataatctgacatttgaaatgcatgcagatacttgtatgcaggcctgaagaggtcaagagagttacaggtattattagaagcaattgccctcccttggagtcctgcctctcagaagataaaaatggaatgactcatgcaattatggaggttgttgctggtgggattgttcaaactgcaaatgatattcatcgttatgtgcggtgtacgctgcttaattccacaagaccttttgatgatgtcgtgaagtcagctcaagactcccttcgttggttatgccataaaagctttcttgagtggaaccatgagaccaagatatactccgctactccccttggtagagctgcttttggaagttcactcaaccctgaggaatcattggtagcatacttgtcttttgctccttcattattttattgcattgagaaagggcctctagctgagttggttaggtggtctgagtagcactccttaggttctaggtttgactttccgtgggagcgaatatcagcctgtggttacctcccatttgtctgtcccacaccaaagcacaggtctaaggtcctgtctagatcgtagtcgtttctcaaatgggctacggtgccgctgtgtatgggtggggcaggggttcgggggttttctcgacctgcgtgagaaggtcttcttaatataatacccgagggctgtcttatcccccgcaggtcgagttttttttttattttattgcattgtttaatcttgcatttttctgtttctgcactaggttgttcttgatgatctttcgagggcaagagaaggctttgttctggcatctgatttacatttagtttacttggtcacacccataaatgtagaccttgaacctgattgggaattatattacgagaaattcatgcaactttcttctcttgagcaggtatgcaagtcttcttttgtcctattgcacttgaaagttcatttatcaaactgtaaatagaatatccagaaattcgagttctatctgtactcattagaaaatagttgaaagtgaattccgaaaacatgattttagttgctgttgaactaaatgtgtgaagcaaaagtgaattcagaaaatgcaaatcaaatttgttacggttataatagtcataatattagtgtaatcttctagtctagggtttccctcatgtttctcatgtactcttatagtgcttattcatccaattcagtgcttgttaatggaatgtgtgaagtctatttcggtatttttacataaccatgaatcagactaaaacatgcatatgtttattgaactccttcgcactgtacttggttgcagtttactacatatgttatttgacctggttcataagatttttttaggagttgtcagttcttattagttttttgtaattcccatgttttctttggcccaacaagaaacagaacaactgacatgataccatgttttctgcagaacattaatcttttatcagtggtattatcattagtgccaaaatgtttataactgtatgccatgtctaccctactaaggcctaagactgtgtccaacactgttttgcactgttcacagagtggagccaaatgtgttcgcttgactttaatccgtaccggcttctattgtttctacagtatttttgtctgtatagattgcagctacagcagtccaaacagttggctttaatctgcagtagctacagacccttttggacttgcgcactgctcatgcgaaaagtggatgcgttactgttcatgtcgggtcctgggtttgttaagacagatattagattagatcgggttgacttgttggctatttctttaactctagaaaatagttaaggatcaaatctacacatctctattgggattgtatctactttgaattaagtaagaaatagatagttcaacagttcctatctggctatctacctccttaacactggctttctcgcatggccaacatgaagtatgcctgtgacaccgtatctttctgccatattggttgagaaatcaaaccattacttaaattatcaacttcagttcagttcatagaacacataatttcactcatttttttaatttctgtttgttttgttggtacaatgcagtcagtaggcaatcgggttggagtaattgaacccttcttgatgcacatggctcatggggcgtcgataccttttcgtgcaaggcctcagagaaacaccgggttaagtaacaagtctgcacaagctgctggaaatactcttgttagtgagcacacaatcagagtgtctaagcgcttttatgtggctttaatgttatcgaggcttgctcaggtataatctaagaactacttagacattgcatgttagttctatgtcaatgcatagtgctcaagatcgctagaaagcctaagtcgtgaaatgtaaaaaatagttcaatagagattagataatgaaggttgaaatgttctctcattatatatggctaattaaaatattagctcatgtcttatatttttgtagaatacacaagagagctatgtatcatttcattgagaagggtataaataaataagttacaacacacccaccacactcacacatatacacatacaaacttgtactggaaacaattcacaacacacccaacatgccttttgcatcagaacaagacccttgggtgggcatttggggaactaaaaatttgtgggtactagaaattgctacccaatttcgagtttcgacctcgaaaaagcattagccaaaattttagatacttgataatttgagttccagttttacttggtgtacctgataattccagtagcattttaaagtaagaaacaaaagtccatcaaatcatttcatatcaattaacaagaaatcaattatcaagatagtacaaatctacattgagccataccaaataatagatttacactatactgaaccactccatatcttcatattagaaaatagaagaacaaaatttttgagatattttgcgtaattcgggtataaatttacccaaactacctgaatggaattcagttttctatagctactattacgaagatggtttccatggtgacctgctagatgggctatatgggcgactcagtttgtgggaatcttatccaaggtatcaaaggtgggacgacaaccactcgaccagccgtgtttccacctgtgaattccttcacgatatgcctgccatctatggctatggcctcgcgccacctcccttttatcaaaccacgcgagcaacgtccctcccatcgggttttcaatgtttatactcgtttgtcaaaaaggaaaatgctctcttgctcagtttcttggcaacatggactttcaagaaaattttcagacacctttttggctctttctatggaagccaccgaagaatacctcaagttctatgatacaattatttcagttcaaaacaacatgcaaggcaaggataaatggatctattcttggggaaacaacaatctacgttcaagcaagatttacatattaaacttacaatccatgtacccaccttctcctttcaagtggatctagaaatccaaagtgagtaaaaagatcaaggtgctcatttggctgaccttcagagacagaatcaactcaagaaattttcttcgaagaaagatgtgtacaattacaaatgatgattacaaccatgttctttgtggccttaattgtgaggaaaccacatatcatcttttatttgaatgtccattcagtacattgtgctggaatcatgttggtattcactgggatcaccctttggatttttttgaaatgaccatatctgcgagggatcaattcagtaaaaatttcttcatggaaattctggctgttacgacctgggagattttggaagcaaagaaatgctgctatcttcatagattcctttccatcttttacgtcttggaggttttgcttcaatgacacgttggggctacaaatgcatagaatgaactcgaatcttagcttgtcgatttccttgtggcttgcttctttattttctttacttctatctccatttgcttctattcttccttccctttactgtacatttccttttttatttaatatataccactgtatgggccttccctacagtttcatcggtcaaaaaatgtccctccaatgccctccctactgccacagtctaccatgccacaggttgttgcagcactaccatgcgctcccaccatatcttgcccaatttcatgtgtatttacaagaatttactggtataagttgctgagaaagtttgggttacacagtttgacccctgagccaggacatacatccttcctagactggtgggaggagtcttctgaagaagttcatgggatggttaagaaaggtctgaactcccttatcatcttgggggcctgaatgatttggaaccattgaaaccgatgtgtctttgatggactgacttctagtctttcctcgatccttgtgtagactgatgatgagagaagggcaactttggttaaagctgtgctcactgctattcccatttatcatctaattgctttgcaatgtccaaggtgggtaatcaaggcaatagacaagattcgcaggggttttctttggaaaggaagaactgacattagaggaggacattgtgtcgttgggtggtccaaggtctgtcgtcccctctctcttggtgggttgggaattcacaatttggaagtnnnnnnnnnnnnnnnnnnnnnnnnnnnnnnnnnnnnnnnnnnnnnnnnnnnnnnnnnnnnnnnnnnnnnnnnnnnnnnnnnnnnnnnnnnnnnnnnnnnnggcccccccgcgctgcaagtatttcatttggcttgcatctctcaaccgatgttggacggctgatcgactggcacgtcatggaatggatcatccagatagttgtcccttgtgtgatcagcaggatgagtcagtgcatcacttgctggtggattgtgtttttacgagggaagtttggtttacaacactaagcaggctaggtttgcaacatcttgctcccacgtctgatgctacaaggtttcaagattggtggagtgaggcagaaagacaagtgtctaagcataagaaaaaaggtttcaactctattgtaattttagtagcttggcagatttggaagcatagaaatgcgtgtgtgtttgacaatgcttccccaaacattcacgcaattttgctgtccatccatgatgaggctttattatggggtcttggaggggctgctgctcttaggcaggtttggttgtagtttgatttttggttttttaattttcgggggtgctttcttggcacctttgtactgggtcttttctagacccttttttcttatcttcttaatatatattgatgcgtggttctcccacgtgttcgagaaaaaaagatgatgagagaagaatatgggaattagctggggccaggggtctttccttcttggcaacacctcttcttgaggtctaacccccctggctctttagtgggtagtgtgagtgtttttacatggatcctttcatttatgcgtgctgttggcctctatagggaggttttttcttgtaacccaggtcttctttagaccttcctttccctaatatatttaaagcttagttcccctgcgcttcctagaaaaaaatatctcgcccaattctcatgcaccaaattcagttcccaacatcgtcttggctgattctaggatggtttgacacattatcgctggccttggtggactacattgccgctgcccatgcagtgtcgtgcttccacaagcttgaatttcattcatacgaatgattgacgtagtgtgagtagttcttccatggctaacacaccttggaggtcgacaagtcgtatcacctattcgaacatgacacgagcacactatcgtggatcgaattcaaggacctttgcaacttgtgtttttggcccccaattcgcaacaaccgcgttgacacattggctcgtcttcgattcttgaccaagatgcaagaataccaagatcatgtcatgccaacaagcgaagttgttcgctatgggatttccaaaatatatcaatcttgacatgaaattgtgggagccccaaaatcttcatataaaatcttcatataatcctatcatgatggcacacactgaacaaccatgaccctagtgtgcgttgtggcacactgaccaaccatgaccctaatgcacaatcagcactgatgctgaactccaacgaggaccactccaatgacaagcacatggacgagcaacaactctagcgttgcacctactctgtctattaacatcaatcgagttgtctaatcatcggaaacaagggttttgtcataattgtgatgagcaatacattcatggccatcactacaagtgactcttctacactgacgttgtcaactatcaggattatattaggtggctatgttgttgtcctcagtgtggccttcctgcgcatacttgcctcgtgttctagcggtaccagtgccacgtcttatgaaggggcattaggtctacatgcgcaagaagtctagctatggttaacgactccgtcaacaccacaaactctaggttcatggaccatctcctcaacatataagttgatctttttgctgaaacaagaggactttatcggcttggcgctgccaccactgcatgcacctgctactaaggacaactctagtagatgtcaatccatacatatacccacaactctagaagaataagctccatgctcgagaacaacatccaactgagtacattagcattgttgggccttgatgcttctcatcaagaaggttggcaactcatggaggttctgctttgactacagtgtgttgaattggaagacagtgaaggataaattttcgatcctgatggtcagtgagctactcgatgagccacccaaaattctttatctagctcgacctttggtcaggctaccaccaagtccacatctaccctgacaatgcgaaatgatgtttcttacacatcatggccacttcaagtttcttgtgataccgatgagcatcgccatcgcactagccacattcaacaacctcatgagcgacatgcttcgatagttgctttgctggctcgtccttgtattttttgatgtcatcctgttatagaacatttcttggatggagcatttgcaacatgtcaaggtggtgtttgatgtgctatgtgcgaacaagttgttcatcaagtggtccaaatgccacttcggtgtgttgttcgtctcctaccttgaccatgtgatctcggtgtatggcgtggctgtggatggcgaaaaggtggaagttgtggcatcgtggccacaactgtgatccactagggaactctgttgattccaagtatcgcgggtattacaagaagtttaacaaggactttggggtcatcgtagcacctctcatgaagctcttgaatgagggtttaggtggtgccaagaagcagaagatgccatgcaggggactcaatgggctgctatcaaccgcacctatactgcagttgttggcatttgacaagctgttcacggtagactgtgatgcgtcgagttgagtgcactaaggcgccagagcattgtcattctttagtgtaggtccttcgtagctcgacatctcaaggtggtagcctacgtgtgtgatacgattggcatggtgtaggcggtacaacgttggaggcatgggcttggtgcaggcggtacaacattggagtccctacttatggggttgaagccgatatggcattggagtccctagttacggggcaccattttctgcgcttaaagttcctgctcgatcaaatacttatcaaccccaacatcaatggatcaacatgctctttgactttgatttggttgaagtgtataagtggattgcctagcttctcccatcagcttaagcttttgggttgaactggttagtgtgtccactctaacatggtatcaaagccagaggtctcgagttcgaatcctgacagagacttaatttgtgcctccacccatttatttccacgtttgcgcgtttctctttgtctgcgtttgcgcctttctctctggctacacgtgagtggggggtggtgaagtgtataagtggattgattaccttctcccattagcctaagcttttgggttgaactggttagtgcgtccactctaacatggtaacagaaccagaggtctcgagtttgaatcctggcagaggctttatttgtgtctctacccatttatttctgcgtttgctccttttccatcagcttaagttttttgcgtccactctaacatatttcatagtgaagttttgggcaagcggaacacacttgctgacaccttgtccaatctcctattgtgacattgagactgtaggcactctcaagaccctcgttctagctctataacgacatttgccacgaggtccagacacagtgagttgggcgatccttggcggatacacgatgtcctcatcctccacgacaactagatcttcctagacacatcctctagcttgttgttcacttctttggagatcgcacaagacaagtgtccataaaaacgctcaagtgcctccaagtggacttttatattgctcgaggccgcaaggtggtctgttattttgtgaaagccttttcacatgctagaggaacaaaatagaaactcttcacctgtcgggactgctctagccattgctggtgatgttgaaggtttggaagggtgactcccttgacttcatggaaggccttccaagggtgcacgagaagtgtgatcctcacagtcaccgaccatttttctaagtatgcacatttcattgccctcgttcaccacctatagattgtggcatcggttgtgaaggcgtcattcgatggtttttatggcttttctagcatccattgtaagcgaccaggaccccgtgaaaggtaacttttggctggacctcttcaagatggctggtgtgagcttcgtataagcatagctttccatctacaaactttttttttcctcgaacagcgcaggagaactgcgcgtcatttcatttaaggaagaaagtaagtacaaaggtcaagagtgacccgaaacacaaacaccaacacacacacgccatccctcaaatacaaccgtcgcgccacatcaatgaagaaggcgaccacaacctacagggctaaaaaagcaccagtaggcaccgacccaaaaacaagttcctggagtttggaagctccagccaaacaccacagccccccttccacattaacagcttttagcacttcctcaacacatggcctagaattgtcaaagacacacctgctgcggtgcttccaaatctcccaagccactaacataattagtgaattgaggcctctacgaagccccttaggaacagcagcaacagttctcttccaccaacctgggaaccgagacactagaggtggtgaatagaactattgcaatgtacttgcagtgcatcacgggagataggtcgtgcacatggctggaatgactgccatgggaagagtattgatacaatacatccttccaaatcacgctcgaagataggcgccactgcccttggtcccattcacagtgcgcaccacgcgaactcaagcagtgcagatggcgctttaggagcgtgaccggtttttggcagagctctatgaatgactggttcaagcccaatatcacgggaaacgctaatacaataagcaccatcgcaaactagagttcgagatcggctcttgggtgtggccatgaacaggttgctgaaaagtgtctctgataccaaagatgatttgtctggattgttggctttattgatacaatgacaaggaaatcatcctgaccgccctccctaggaggctctggtcataataactcacttcttgctaaacccgtaatcaacattaggtttacagataaataggcttagaggttagctgttagagaaaggtatatgctgttgcaaaagatgatgtcttgcattgagctcttagatgatttatacagagtacatggcgtaggaggtaagacaacccatggatacatatggcagtctatgaagtataatatctagactatcaaatatactctaacacatgtggcagtctactagacaatatctagactaccaaatatactctaacactaaccactcccctagaatttctcttttttcctattgttcctcctagacttccaactaagctccatgcagacaactacggaaaaactcaacaaacttgacaactaattaggcgtggctgttagccacatggtgttgtggacgctggcttgttcttcttgtggcgagtatagacttgctgataagcgtccacaacaggttgttcgtgactgctggtgtgttaactctactatgaaaatatctatgtgcagtatgaagaagctaagctatttggttcagaactgaacctgtattcagtcttagcaactctactcatcaccctcctctagttgcaacccaatagagtatttctgatatgtctttcatatcatatgcattttgtacaagcagattagattatgtccaagttgtgtattgtaatgattttaatgtaagtttgtcttgtaatatagtctttaggaattgttccttgtggtattatttattatctgtttcttcttgtcttttgtttgtttatcttttattccaagttggggtgttcccatcttgtttccttgaaaagattgtactgttctcatgtaatgcttctttcaggagattcctattgctgatgtttgtgagacatttaaggtcgccagaggtatgattcaggcactgcaggaaaatgctggcaggtttgcttcaatggtttctgcattttgtcaaaggcttggttggaatgatttagaaggccttgtttcgaaattccaaaatcgtgtctcttttggagttagggcagagattgcagaactgacatcaattccatttgtcaaggtgtgctttaattaccatgcatatatgaattatctaagtgtctctggatcttatttcagtatggtcatgtaaaatatgaaatagggttcacgtgcaagggctttgtacaagtctggtctgcgtactcctgttgccattgctgaagcatctattcctgaaattgcaaaagctctttttgaatcttctgcttggtctgggcaaggtactctttcacgtattcatggtctgattccttactactcttttttatagtacttgttttgatgaggatataaatactatagctgaaatcctgtcctgtacagtcaaggattttccttgtacttatcttgggctacctctcacaattggcaaacccacaaaggaggtcttgctgccataattgaaaaggtggcagaatttttgctgggatggaaggcttctttaatgaactgtgcaggcagattggtaatggttcgagtagtgttaactgctgctcctatttaccttttgattgccatggatctaccaaagtgggttctaaaagccatcgacaaaaggaggggtctcctctggaagggccaggaacaagctaagggaggtcactgtttggtctcttgggaaagggtgcaacagcctctggaatatggtggtcttggaattcataatctggatctgcttggctgcgcgttgcagattcgctggttgtgggctgagaaaactgatcctagtaggctttgggcaggcctccccgctcaagtccctcgcaatgcttaggccctcttcaacattgcagtggacatcattgttgggaacggtgagcaaacactcttctggacagacagatggctggatggccataccatatctgaagtggcacccagcttatttagtgctgtctcgaagcggacagccaagaggaggacggtagcccaagctctccaaaaccaaaggtgggtggatgacatcaaaggagcactcacagtccaggttatattcgagtatctaaagattgtcgcatggtggatggtctgtttttgcagcaagatgtgccggaccaattttgtgtggaaattaacacaatccgacatttacacagcatatagtgcttatttcattggcaccatcaaatttgggccatggagaagaatatggaacagttgggcacctcctcgctgtaagtttttcatttggctggtgttccataaccggtgttggacggttgatcgccttgctaagagaggcttgccccaccctgatgcgtgccagctctgtgatcaagatgatgaagacattcaccatctcttggcctgctgtgtttttgctagacaagtatgagcaagcatctttcttcagtcgggccatactgccttggcgccatatgcttcaacaatctgtttttcaaaatggtggtggacagtaatctcaactgttcctaagaaaatgcggaagggtctaaattctttgatcattttggtcgcttgggaactgtggaatcattgtaatgcttgcttgtttgagcaacataggcccaatgttcaggaagttcttagggctgttagggatgaaggtagtctctagtgcagcgctggagcaaaaaagctccaagagctaatggtcacggtgttcagtctgggggattaggagcttgttgaggttcctttccctggccgcctttcttttttctcttctgtttgggttttagcgtctccagggtgggaggcgtgatgtacagtgggtgtgggtgaggtgttcttgtatttatttttggcattcctgcctttcttctaccttaatgaaatgttgcgcagctctcttgcgttgttcgagaaaagaaaagatgcacaaattggtttctcagttacttctggatatattcagtaataagcttgcagatactttattgtttgttttaagcctactctaatgtcaatctgttgaattgactaggtgattctggtttacgacgaatgcaatttggtgtagcaaaaaaaataaaaaatggagcccgcaaaattgtcctggaggaggcagaagccgccagagtagcagcattctcagctttcaagtcacttggtgtggaagttccccagttcactgcacctccactcgcagctattgaggaatatccaactcacgataccatagaccaagctaagttaaataagctagcttctggtacccattctagagatgataaaaatatgaatacttgctctgattatgctactccaagggcttctacatacagtctaagaaaggacacaagtcctgctccttccattcaaatgaaagagaatgcaggactatctaaaaatgtgcaaatcactagacagggagcatcatcatctttgtcaacagaaattgctgatggatctagtagagatgtggctgaaaaaggtcctgtccatgcatataacttcccagggggatttgattgttttcttgatcaatggtccacagctagtaattttttctttgatgttcattttatcaagagatcgatgaaaccatctttgaacctttttgaagtttttgggttggctgtctgttgggaaaaatctcccatatactactgcaacttcccaaaagatctagtcactactggcaacaataacatcaaggaaatgtggggtaattttcagagaagatgggaaaaaatagcggacattatgaaacaaaagagtgtccaaaaaatgacatggaatttaaagatccagatccaggcacttaaatcaccttatatttcttgccaacggcttgaaaggtttcatcttgaccataaaatgctggacaaagttgaagtgcttaacaactcatatatgttgttatcaccagtctctgtctacaatggattggatatatgtctgctggcgtgggttctatggccagatgaggaaagcagagcggttccaaatcttgagaaggtatttgatatatgtcgtgttctgcaatatctttagcttttcgttgctgatgcattgtcacttcatgtacattttttatattcgtttttttctgaactttgcaaaagcaatatgagtaggaattttagttgataagagcctcaagaaccgtgtgttggatatgaaaatgcaaggaaataggattattcatatagggcatgatgagaatgctaagagactttttaggaagacttagatgtcatgtttacaactatacctatcagtaagaaacttttcataggagatctcaatgggcatgtaagtacaacaagtgtaggttttgaggtgtttcatagaggcttccccaagcttcacgtctcagacaatgtttcttgaccaagtgggtttggctatgacatgaagctaagaaacattgtctggtcatgtccactttggagcgtaccgctcgtttacgctctcgaatctgcttccttaaagatggtgataccaattccatagctatgttttctggtcgcccgaccagctagtcgaactgggggatcgaccagcgactaatctcgattagtcgtcgactaggtccgactaatcgagctctggtcgacctggtcgtcctgttcatccaggagaccaggacctatgtatatactatataatatatactattatactatatagtaaataattatataactatatagtatatatgaacttcatatactatattatgaaggatagggtaaacatgacatgaattcagcaatactgaaaagtgaaaacagcatagaaacacttctagttattaatactacaagtcccagataccagtaccacacaacacacattaatactacaagtccaaaaaaaaatctaggtcctaaacctagtcgcccagaaccggctaatcgagcgactaatcggccctaatcgtcgactagtcggacgaccagggcgaccaggtactctagtcgagtcgactgcctaatcgagctctgctaaccgactagcccgactaatcgcgactaatcgcgattagtcggacgacttgaaaacacagttccataggcatgccagtttccggaaacaaaagaactttattgggaagttggtggttgatgatcagattttcacctcgcaagatgagaaacagaagcttgatggtatcttaattgcggatgcaagaggagacttatctttcagttatatcttttggtcgaacaatgtgcttgacaagtggagtatagtggtactaatctacacgagtaagggaaatatttaaagttgtatcaattaccaagtaattaagttgatgaaccatactatgaagctatgtgagagagttatcgagcattgtttgagaggaataatgaggatctctatgaaccaatttggtttcatgtccgaaaggtcaaccatggaagttattttcttaataagacaagggatgaagcagacagggagcagaaggacctacacatggttttgttgacttggagaagacttatgacaatatactaagaaatgtcatgtgttggtttttggacaaacataaaatctcaaggaagtatgttgtagtcattaaagacatgtgttcgaacaagggatggagacacaaataacttttcgattagaatatgactacatcaagggctggctttgagcccttatctttttgccttggcgatggatgaggtcacaagagacatacaaggggataccccttggtgtatggtttttgcgcacaatgtaatgctagttgatgaaagccgagcaagagtaaatagaaaactagagttgtgatggaagactctagagtctaaaggtttagactcaatagaacttaaactagagtatatgagatatgacttcgacactactgcacatgactacatacggaaagagatcttagtttggaagtttaagtagtgcttaggaaggatatcttttagtatttagaatcaatgctatagaatgacagggtattgatgaaaatgttagccatagaatcaaagtagggtggatgaagtagtgtcaaccatatgatgttctatgtgacaagagtgtaccacagatgctaaaagacaagttttaccaaacgatgattatacctgctatgtagtatggtgtagaatgttggcctataaaaacacattttcaatagacaagaagggattgagttcgaatcatggaatggtgatacacatgataagctaggggtagcaccaattgaagaaaatcttgtctaacacctgttgagatggtttgtaccatggtttttaaagcggtaaggcgctccaaggcgttggaccaccgcctagacgcctaggcggcgcctaggcgacgcctaggcgaggtaggcgggcaaggcgcctaggcgtcagaccaccgcccggacgcctaggcgtcgcctaggcgacgcctaggcgacgccttaaaaacagtggtttgtacatgtccaacagagaactccattagcaccattgtgtagtgacgcgctaataatgggaagagagatggagaaaggctaaagttaatatggaaagaggcattaaaaggagtcaaagatttagtcttgaataagagtgcatggaaaatagctatccatgtgcctgaaacttgacttatggtttatgttgggtttcaacgctagcctatcctaacttgtttgggattaaaaggatttgttgtttcttgaatacgcaggaggtctgcgtatttttatattaagaagaaaaaaggggggggggaccccaaaacagaaacaacagttttacaaactcacaccaccattaacgcctaagacaactcctctaaaaggatttgttgttgtttgcaatagcaatacacagctgttaattttgatgctgacctatttctgataatatattacttttgcattttactttgtgataaacagtttgtcaagaggcgacttcatagtcaagaagccgctgctgcaaatcgcgatggaagatggagaaatcagatgcacaaagcagcacacaatggctgctgtagacgtgctgcacagacacgggctttgtatactgttctgaagaaattacttactcaaaatctttctgttttggttgaaacaatcgaggccccattggtacaacacctattcttacttaatactctctccagttataacaaaagtgtcattttgggttgcctgcagttaatttgtttatactttgatgctttggattgaatatctgaaaataacgcaactagattcttcctggaaagtagttcaaaatataacaactttgttatagtttcatacattttgtagcaatcgaatcatcctattagtacccatgttggtatccaaaattacacttgtgatcggaatacaatattgctgcttgtattatgcttggatatctcttatgcatttattttgacaggttaatgttcttgctgatatggagctttggggaattggcgctgacatggatgcttgtctccgtgcgaggcatattataacaaaaaagctgaaggaactagagaaagaagcttacagattggcaggcaagaatttctctctaaatgctactgctgatatcgcagacattctatatacacacctaaaattgccagttccaaaaggctgtgagaaagggaagctgcatcctagcactgacaagcagtctttggaccacctaaggtattttttcattttccttgttagttctgacatcaaacatgttatttctagttctttggaagtacttgtgtgccactttatgtccgtgcattatggatggaaaattttaaatgtgttagcatatctagtgtctagtcactgatggtctattggtagttttgtgtgagtaaaggtaaattattatgttgtcttgatcagagctagaaaagtgcttgtggaccaccggccacatgttattggcagttaatctctggacatgcttttagaatatcattgtgctaatatgcactctttttctgttttttttggagtcaattaacaggattaactcatttttcatccctaattaaatacacgcatgcatgttcaaataatatcttcaatttggaaaagcttatgccaaagagaagcacatgtatcactgctttactgtattttcagtatataggctgctgctgatgtccttattgtatgcactcggaagatcggtagcaaggcaacactacaacagccttgccaagctggtcttcctttcgtttgaaatctatggcactcttttgatttcacttggccccaaattttcctcgacataaaattgccgtggctttatagtttactataaaatccttatcaactggacataatgctctctttaggcttctattaattatcccagtaatgtaggagaatttaatttgaccattttgctaaaatatttttgaattcttctgtttcctcagggatcaacaccccattatcccattaattaaggaacacagaacattagcaaaactgttaaatggcacgttgtggtccatttgttcacgtgctcaattgtgcactcaatcacaaaggtacatcatacatggaaattggcttcagacgtcaactgccactggccgtttgtccatggaggagccaaatctgcaggtcctttagttgtaataaatgctttgcatgttttgtttggatttcagttattgagaaataacctactgacttaacctgttactatgtagtgtgttgagcatgtggtggaattcgatacagggaaaagcgataaagattactcaagcatgtcagttgatgatcatcataaaatcaatgcccgtgattttttcatacctaccaaggtttttctcatttcacttttatgtatttattaagttttccctttaattaggacagttgactattttcctgtaacaacgctttatttaatatcatgatttacttattttgtaggagaactggttattcataactgctgattactcacagattgagttgcgtttaatggctcacttttctaaagatcatatgttggttgaacttctaaagaaacctgatggtgacgtttttaccatgattgcttcaagatgggctgagaaagaagaggccttgatttcttccaaagagagagaaaacactaaaagattcatatatggcatcctttatggaatgggtgcaaactcccttgcagaacaacttcagtgcagcactgaggaagctgcacagaaaattcaaagctttaggagattttttcctggtgtttcctcatggttacatgaagttgtgttatcctgtcgccaaaaagggttagtctacttggtagcaatttctgtttagtctttctttttatataatattgctcctttgatttttgatgctaacattgaatgagctctgtgaaaaatatgttagtcttaacttttgtggtatttcatatctgaacttttgagatatttcatatttgagcatgtattatcatatctttcaatgttagtatgcgagctgcttctcataataatttaaggtgaatatgcttcatgataatttgattttatttgaatgttaagtttatacagtaaatgataaggattactgtcttttggtcatgttatttatataacgactacttaagatcagagctcctttatctgttgggttgacatatgcacttgtagcccatattgctcatgagattgtatatatattgtcgtatccactactagcggtcttacgaaaccccaaggttactaaagccatggattagagtttgggataactttcaaatgcactcatgattcaattttctttttacctggtttgtgccgatcagaattaatgtctgcgcccttcttcagtttgttgtggcctaacttgtgaaacccttgctatctcacaacttccatctgttagacaatttattttcttccctagttacgaggatttcttctctgattatgtgccagcagttgtttcctccgtacgtagctgtccttgattaggtgtggacaattggttccttcctccctggctgtttccttttagcgcccagatcatctccccgattattgtttccatgaaatcaggtggagcacgttctggtagaggcctattgttctcctgctatttagttgaatataagcaacatttcgcgctattatggcatcaagagattgttacgatcccgtgagaactcgcttttggtaatacttgcttgcccacgtcgcctccccgatgttgtgccgtcatgccacctagtgaccctctgcccgttttccggtgaccaacaacataccgaggatgcagccacataggagaaggcctgctagatccttatcgttgctgccgatgaggctgtcaaggccgtcactgccgcctaggatcatggccgcacaacccaggacgctctcgcgagggaacgctaggctgctaccggtctcaagcgtgctaaggccgctgctcgtgacgctgccttccctcctctcaacgacgaccctgatgatgacgccgacgctagtgaagacttcaattatgaggccgctaccgcctccaacctccacgtggaggccgtgggcgtacagaacctccatgcccttgtgcctgtggttctggacatcctctccacccactacagtcgctgcgggatctcgtcctcctcgccctcgagcggtatgccgtcgccgaccatgtcctcttcgacgccctatttgtgccatcctatcgacgcatggacatcgtcgtcttgtcatgggtgttgtgcacgctctccctgagtttgagttcgctcgcacccccggcggcacaacacaccacacctggatcgttgttgaggagcaattcctcggtaatcgtgaagctcgcgcccttcatcttgacgccaaattctatgtctttatgcatggtgacctctctgtcggtgactactgccacaagataaatgggatggctgacgctctcggtgatctcggagtggttgttcgtggccgcatcctcattctcaacgtgctacacagcttgaacgagaaattaaaccacatgaaggtccactttcatgcactccaagctgctaccttccttcgtctgcaacgacctcatcctcgaggagattgactacaacgcatcaacaccgccaccagcagccgcccttgttgctgtgcatggcctttcggtagctctgcttcccctagcgtcccctcttctgggggcttagctgcgcccctgtcccacccacggcgccctccggtagcatctccactggtgccgacagctattagtagctaccgtcgtcgttgcgacaacggtggcgttgaaggcaaggccatggttccctagcctttgatctacaactcgtggaccgagttagtcaccatgtggcctggccccacatgtgggccacaagaccgtggtggccaaacgccgcgcgcgcccatgcctcaggccacgcaacaacagttgacaacaacatgactagttcgtggtcatgtcgtttggcttgaggaatgcgttaacatcattctagtcccccttgagaattgaatagcactcctagctgacaccatggactcatcgcactcttcatgggttgcttggcctcacgggcttctaccgcttcttcatcaacaactacgacatcatcaccacaccatgaacatccctcaagcgtgttgccttccagtgtgctgatgtggcgactacatcctttgaggccttcaaggcggccctcacctatggactggtgctgcagttgttgagcatcacggcttcgtccatcatcgattgcgattcttcgggcattggttttggcgtgctcttgcccgatcgccttgtttagtctgtggatggagccccagcctaccaaacttgccacctaagagcgcgagctcattggccttgtgaaggctgtgcggcactagaggtcgtatgtctgggaccggccagtggagatagaagattgggtccctaatgatttctcccctactagaatactgcaacagaacctttgaatcttttagtcctgaacaagttgtgcaggctagtttcgaaatgcaacaagggaccacaatatcgatgatacagctaggcatacatcaaagaagtttctaattcgttatcactcctcagatttgttgagactttattaggccggcgacgtgttcttacaaaaataacggctggcaatagcaaagagaaagctaaagcacagaggcaagcagtaaattctatttgccaggtaatatagcattctcacatagttttagatggttgattttattgattatatgattaatatgcatgtgtttccagggttctgctgctgatattattaaggtggctatggttagagttcattcaataattactaacagaactagtgcaactgattccacagatgaagttacaaggaaattttcagaacttggtggccagtgtcaccttattttgcaggtgttttaagacttgcattgcatgatacttattttcttttgacttttgctcagtttggctctaaatatggatgaatgcaactatatatttttcatttgtaggtgcatgatgagttggtattagaagttgatccgtgcatggtagcacaggctggaaggttgttacagatatgtatggaagaagcagcttcactattgggtatcagttttaatctaaacttcgatagttatcttatgttcagtctttgggagcatcttgaaaaggtctttaaaatttacctgctaaactaatagttatgccaagtgaacaaaatgaataggaagttctatttctgccgttctccaatagttaggttcttaaaactaacaacctgggcaggagggtatggggggagcacgcaaaaactgcggaggaggaggcacaaatagtagatatgacnnnnnnnnnnnnnnnnnnnnnnnnnnnnnnnnnnnnnnnnnnnnnnnnnnnnnnnnnnnnnnnnnnnnnnnnnnnnnnnnnnnnnnnnnnnnnnnnnnnnnnnnnnnnnnnnnnnnnnnnnnnnnnnnnnnnnnnnnnnnnnnnnnnnnnnnnnnnnnnnnnnnnnnnnnnnnnnnnnnnnnnnnnnnnnnnnnnnnnnnnnnnnnnnnnnnnnnnnnnnnnnnnnnnnnnnnnnnnnnnnnnnnnnnnnnnnnnnnnnnnnnnnnnnnnnnnnnnnnnnnnnnnnnnnnnnnnnnnnnnnnnnnnnnnnnnnnnnnnnnnnnnnnnnnnnnnnnnnnnnnnnnnnnnnnnnnnnnnnnnnnnnnnnnnnnnnnnnnnnnnnnnnnnnnnnnnnnnnnnnnnnnnnnnnnnnnnnnnnnnnnnnnnnnnnnnnnnnnnnnnnnnnnncccccccccccccccaaaaaaaaaccaaaaaaagggagctgttctaagaagcccatggagatgctctaaccaaggtaaaactgaattggtgtttgcttttatttcagtacctttgcgcacaaagataaaggtgggaaaaacttggggttcactagaaccattctatcctgagccttgttgatgcaaatggttaatgtcagttggatgccaatgtttcacgacatgcaaggtcctggaagaaggctgaacaatttccaatatgccccacagggaccttggtaaatcctactcttttttatagaagattcaccccctgcagagttaatctcatgaggcctgctatttgccactatcgtttcttgttctgcattgtccatgtatttaactgatgcataccttgaaccatatatgaccatatatccgtgtgtggctttgctaatcttgtattttgaatttagtttacattttcatcttcacggtctctttgaaacttcaaatgaatcaggtgattctgtctggtgttcttcggtagaaccttcattgctatgtctacagtcttctgtcattgctgaccgtatgtgaaatcaacgcaacagcgaccagctccattactgaggatttgctatggactggtgattatcattatgattccatgtggcatgcaagaagcatatatatatatatcaccaatagatgctgttaaagggtttaaggtgtatttgaaaggtcttcctagttatactgcgaatcttttagataaacccttaagaaattggagggcctagtatatggtgatttttcttttgctaggtccagcgctaaaaaaccgattatggggtttattcaaagatgaaatttcatcctgtaactacaggttcaaggtgtatttggtttgatggatatcactatggacaagcgatggttggtttttgtacaagttggatgttgataaaaatgttggtatccatgccacacaaaaaaagcctaaccagcacccatattttgtaatccttgtcaagtatgttatatggtttacttgatagctctagcgaggctatccagtacctcaccttcaccctcatatttgtaatccttgtccacataattattagtatgttatatggttatttagtaattacgatggaaatatta

SEQ ID NO: 25 - DNA, 154 bp, Artificial Sequence
  marker ma61227s02
ccatctcagttcttcccggccaagaagcggaggccctcgtcgcggaagggcgagtcgccgygacccgggacgcagcatgagagccccggcggcgccaaggggtccctggaagggtacctcgtccgttcgccttgcaaccgtgccgtggcagcgg

SEQ ID NO: 26 - DNA, 72885 bp, Artificial Sequence
  genomic DNA of mutant pol theta (c->t at position 233)
  misc_feature (5583)..(5733): n is a, c, g, or t
  misc_feature (31155)..(31650): n is a, c, g, or t
  misc_feature (44470)..(44479): n is a, c, g, or t
  misc_feature (45143)..(45152): n is a, c, g, or t
  misc_feature (46993)..(47109): n is a, c, g, or t
  misc_feature (53299)..(53398): n is a, c, g, or t
  misc_feature (71287)..(71733): n is a, c, g, or t
gcccagcaattcaaaagaaaccgaacacccttccggaaattccctctggcaatggcgtcgggctcgtctcgcccccaaatcgaccaggtaaaaccctaacctagttcctcgcctattcacttcgtcgcctccaagcgctaattcttcctgcgttccggctccatctcagttcttcccggccaagaagcggaggccctcgtcgcggaagggcgagtcgccgcgacccgggacgtagcatgagagccccggcggcgccaaggggtccctggaagggtacctcgtccgttcgccttgcaaccgtgccgtggcagcggcatcggtggtccccgtgggctcgcccaggggcggggacccgggcgccaggcgtagcctctcggccgcaatggatgtcgacgtcggttcctcggcttcggtggctgcggcggcaggtgacggggcagactttgatctcaggaggagcacggcggatttcttgtcccattcctgcaggtgagcgcgcacagtgtgaaacataaggggagttatagtattggttccaataactgttattttgcaagttacgggtctaattttgttgttccagtgctatcctgcctttgaggggtgactgtgattacagcgagcagtgccagatgaagcagaagcggagtgcgtcccagtcattcttggttccttgtgacaacgactatgtcaagaagcagcgagttgcccattgtggtggctttgaagctctaaaggttggatcaagatacactatccatccatctttagcatcgtcatatgataagtgatttcatgagtttcaactcttagtttggttctttgcaggagttagatgataatgtagcttccatgaagcaatgcatcaatcaccatggtggctcagaggctgtggaggtttagttatgcctgaacaagtcaaacctggaaccgtttctttgttttcctcttttccttttgaacttctcattatttccttttcatcaggaatctgttgagggggaacatgtgagttgtgttgggttttcggccttgcaaagatgtagctttaccccaagtactgcacagataaaagttgggttttctctagcacctgtggaaaccctaaagtctgtatcgaggaattcccttacttcacctggtgaggagttctggaatgcagcaattgaactcgctgatgggatatctgcccaggctgataaggtccgtggaaggccagaatttgatgcagcagaagacaagtcatcttgtgcagtagcagcattctttaagactcttcctagatcaggaagggatgagcttgactgtcaaaacacagtaggcagcaatgatacacatcatatagagaaattgtcaaataaagttgaatcactggcagtaaactgtcagcatataattagctcacctttgcctgtgaagcagctagatttctttcatgaggatgatattaaagtttcaggttcaaaatttgaaacaaaaggcagctatgaaacttgtaatgcacaagcagaccgtgttccactgaaaggcagtggccgcctagaaaaggaaaatctcatggaccctgtggatgtgatgaagagaagtgctattaatttgcacactgattctgcagccatgagatgtcagggtgttttcaagtcaacaactgaagggaaggttcatccaactcaagaggctggaagagattctaatcttattaggagagatctcaatcagccaacccacaatgaaaataaatcacttgctgcatattcaaataatcgcaagacttggatagattccaagagtaaagttgcttctcaggaagtggaagctagcacacctactagctccattcctctaaaggatcactcaaagatatcaagttggcttcctcctgacctttgtgctatatacatgaaaaaaggcatttcagagctgtacccttggcaggttaaggttcttttctctaattatctatttaatgaatctctggcagctagccttctttcgtctggccatttttgcctatgtatttttttctccagccatgcaaactaccactgccctctctactagtaggattaccaattatttttgctcgtaagctaagcttctttagtatttgtatcgtaataagtatgtcttgaaaactagtacttagtatatcaagtgctgagatggtttgtacatgtccaatagagaccttttagaggcaccagtgcatattagtattataaaacattaaaacgtgatagtaatgggaagaggtagggaaaggccaaacttgatatggaaagatgcaataaaaggagacttaaaatgatgaaatatatctaaagatttagtcttcaatatgattatgagtgcatggaaaacaactattcacgtgcctaaccttgatttgtggcttgtgttgggtttcaactctagtctacactcacttgcttggtactaaaaggctttgttgttattgttgattcatataaaatgctaagtcttctcttgtattgctgtcatcacattcttttcacgtttttaatgcgtttttgcttcatttttctcgaatattgtaatgctctcctagatctgtctgaaggcatgtttggtttgtgcccccactatgctaaaccaaatttggcaatagaagaaaccatgacatggccttttgtaacaccccgtccaatccctggaccggcggtacttactcctggtagctctctagaatcatatattgtccccacagaccaacacaagtcttttatgcgcactttgtcctcactcatgcgcacccgagaaaacttcccagtcggtcacccatcccaaattgctccaagccaagcacgcttaacttggaggttcttttgagataggcttcctaaaaagaagatgcaccttgttgatatggttactctattaattctattaagccttgggccaggatatcccatcccaggggccaggatatcacaattcaccccccttagaagaccgatgtcctcgtcggtcaaccccaatccaggaacctcccctcttagccacgtctgtgtgtctagtgtcgtcatatgccatgccatgtgaccactctgggcccacatgcgccatgcgccatatacccaaaccacctagcccacacacgcccgtgaaacatcgagggtcggctctgataccacttgtaacaccccgtccaatccttagaccggcggtacttactcctggtagctctctagaatcatatattgtccccacagaccaacacaagtcttttatgcgcactttgtcctcactcatgcgcacccgagaaaacttcccagtcggtcacccatcccaaattgctccaagccaaacacgcttaacttggaggttctttcgagatagacttcctaaaaagaagatacaccttgttgatatggttactctattaattctattaagccttgggccaggatatcccatcccaggggccaggatatcacacctttaggcaggtacaagatttgaattggattattggagccaaataaatttacataaatatctacctaactaaaaggaacaatgtttcttgttgccccttccacccaatgataggtggacccaaggtaatcctgcgtctcttatgtcaggtcagcactctctcgctaagagccatttgttcatgattgaatagccaagtgagatggccaccatcctcgaggtcatgttttcggacctaggatgtcaggccgaatgtgttctggttcttggagttgtattttgtttcttttaatataagccgttcggttgcataggccaaaagagcagtttgaggccaaatgaaattttagcggcgagagctgtctcactgagttgtgagtttgaagcagtctttccgcatttgcgcggggggggggtgatggaataagtcttgagcatctagaggacagcctgcttttgactgtcctctgtagtcctttagcatctagaggacaacagtcgctttttgactgtcctctgtagtctctttagcatctagaggacaacaatcgcttttgactgtcctctgtagtcgctttagcatctagaggacagcagtcgctttttgactgtcctctgtagtctctttagcatctagaggacaatcctgttgtgtagtgtgtgtgagaaggtgtggtagtgcagcccctagggctataaatatgtgtccccaacctctctaagggtatgacattgtgtagtgtttgaggaaataaacagaaaattgccccaactcatagtgtcatcctcttgatgagagttagagtccctctacttacaattggtatcagagccaaactatcctgcagcctaaacatatcgtgctcatctccttctcgcgtctctccccacactcagtcggcagcaagagctccaactgttccttcctcccctgctcagacgagcagcctttcgtctgagacagcctcttccacacgcagcaacccctcactagcccaccatgtccctacgctcggccacttcgagtgcgcggcgccagcaggaggccgaggtcgccgcggcacaagaacgcgagcgagcagcagcagcggctgcagcgacagcggcgagggcagcacggttggcggcggcggaactggcagcggcgagagcggaagtagaagcagcggaggcggcggatgctgcacgtgcggcggcaacagagctcgaggttctgcgcggcagtagagctggcagctctgcttctgtcgacgacaacaccgacgaagagctcaggctggcgagggaagcagcgcgagagcaggcggcatagtgggcagccgcgcatccccatgggggcgcgcgtggcggcagcccggatacgcgctgacggcgctctaggcggaggcgcacgcggcggcagcccagacgggcgtagacgcgccggcggtgctcccggcggcggcgaccgagtcgacggagatcgcggcctctacaggcggcgcggttctccctccccggatcggtaccatggtcgccgcatggcccaggccattgtcagggacatcggtcccggcggtggggggcctaccctcaccaagaccaactacgtcgagtgggccgcggtgatgagggtacggctccaggttcgccacatgtgggaagcagttcgttacgacgacgtcgactaccacgaggatcggcgggcgctggatgctctcattgctgtagtcccgcccgagatgcagttttcgctttcccagaagcggactgccaaggaggcctgggacgccatcgctgcgacccgcatcggcagcgatcgtgcccgcaagaccacactgcaggcacttcgcaaggagtgggagaacctggccttcaagccaggtgaggatgttgatgactttgctctccgcctcaacactctgttgcagaagatggtgcagttcggcgacgacacctacgatgaggagagagctgttgagaagctcttccgttgcatccccgagaagtacaggcagattgctcgctcgatcgagtctctgctagacctctccacgatgacgatcgaagaggcgattggtcgcctcaaggtggtggatggcgacgaaccacaggctctctctgggcctatcactatcggcgggnnnnnnnnnnnnnnnnnnnnnnnnnnnnnnnnnnnnnnnnnnnnnnnnnnnnnnnnnnnnnnnnnnnnnnnnnnnnnnnnnnnnnnnnnnnnnnnnnnnnnnnnnnnnnnnnnnnnnnnnnnnnnnnnnnnnnnnnnnnnnnnnnnnnnnncagggtgacaagaagaagggggagtcctcctcctcgacacgaggccgcaaacgcggcaagccgcgcaagccgcgtggaggcgcccaggccggggcgcgaggacatgctgagggtggtgcacgtggaggtgcccaaggcggcgccgtcggcaacaagaagccggcacgcgacgacggctgccacaactgcggcaagcttggccactgggccagggattgtcggcagccacgacgtggccaggccaacgtcgcacaagcagaggcggaggaggaggccctgctcctggcacatgcaagcatcgagccatctccagcggcaccggccgcagcggcactcctccaccttgatgagtcgaaagcacgcgctttcctcggcgacggctccaacaaggacatgatcgaaggatggtgcctcgacaccggcgccactcatcacatgaccggccgacgggagttcttcaccgagcttgactctagcgtccgaggctccgtcaagtttggggacgcctccggtgtagagatcaagggcgccggctcagtcgtcttcaccgccacgtctggtgagcacaggctgctcaccggagtctactacatccccgcgttgagaaactctatcatcagtttgggacagctggatgagaacggttcgcgcgtggaggtcgagcacggagtcatgaggatctgggatccctctcgtcgccttcttgccaaggtacgcaggagtgcaaatcggctttacatcctcaatgtgaaggtggcacaaccttgctgccttgctgctcgtcgagacgacggggcatggcagtggcacgagcgcttcgggcaccttaacttcgaagccttgaagcggctcagcgccaaggagatggtacgaggcctgccgtgccttgaccatgtggagcaattctgcgatgtctgcgtgttgacaaagtagagactgctccccttcccccagcagtcgagcttccgagccaaggagaggctcgagctcgtgcatggggacttgtgtggcccggtgacaccagccacaccaggaggacgacgctacttcttgctgctcgtcgacgatctctcccgctacatgtgggtgatgatccttggcagaaagggagaggctgcgaacgccatcaggcgtgtgcaggtcgctgcggaggcggagtgcggccgcaagctgtgatggaataagtcttgagcatctagaggacagcctgcttttgactgtcctctgtagtcctttagcatctagaggacagcttgactgtcctctgtagtctctttagcatctagaggacagcagtcgctttttgactgtcctctgtagtcgctttagcatctagaggacagcagtcgcttttgactgtcctctgtagtctctttagcatctagaggacaatcctgttgtatagtgtgtgtgagaaggtgtggtagtgcagcccctagggctataaatatgtgtccccaacccctctaagggtatggcattgtgtagtgtttgaggaaataaacagaaaattgccccaactcatagtgtcatcctcttgatgagagttagagtccctctacttacaattggtatcagagccaaactatcctgcagcctaaacatctcgtgttcatctccttcccgcgcctctccccacactcagtcggcagcaagagctccaactgttcctccctcccctgctcagacgagcagcctttcgtctgagacagcctcttccacacgcagcgacccctcactagcccgccatgtccctacgctcggccacttcgagtgcgcggcgccagcaggaggccgaggtcgccgcggcacaagaacgcgagcgagcagcagcagcggctgcagcgacagcgacgagggcagcacggttggcggcggcggaactggcagcggcgagagcggaagtagaagcagcggaggcggcggatgctgcacgtgcggcggcaacagagctcgaggttctgcgcggcagtagagctggcagctctgcttctgtcgacgacaacaccgacgacgagctcaggctggcgagggaagcagcgcgagagcaggcggcacagtgggcagccgcgcatccccatgggggcgcgcgtggcggcagcccggataggcgccgacacgctgacggcgctccaggcgggggcgcacgcggcggcagcccagacgggcgtagacgcgccgacggtgctcccggcggcggcgaccgagtcgacggagatcgcggcctctacaggcggcgcggttctccctccccggatcggtaccatggtcgtcgcatggcccaagccattgtcagggacatcggtcccgacggtgggtggcctaccctcaccaagaccaactacgtcgagtgggccgcggtgatgagggtacggctccaggttcgccacatgtgggaagcagttcgttacgacgacgtcgactaccacgaggatcggcgggcgctggatgctctcattgctgcagtcccgcccgagatgcagttttcgctttcccagaagcggactgccaaggaggcctgggacgccatcgctgcgacccgcatcggcagcgatcgtgcccgcaagaccacactgcaggcacttcgcaaggagtgggagaacctggctttcatgccaggtgaggatgttgatgactttgctctccgcctcaacactctgttgcagaagatggtgcagttcggcgacgacacctacgatgaggagagagctgttgagaagctcttccgttgcatccccgagaagtacaggcagattgctcgctcgatcgagtctctgctagacctctccacgatgacgatcgaagaggcgattggtcgcctcaaggtggtcgacggcgacgaaccacaggctctctctgggcctatcactatcggcgggaagctacatctcactcgggagcagtgggaggcctgccagggtgacaagaaggagtcctcctcgacacgaggccgcaaacgcggcaagccgcgcaaggcgcgtggaggcgcccaggccggggcgcgaggacatgctgagggtggtgcacgtggaggtgcccaaggcggcgccgtcggcaacaagaagccgacacgagacgacggctgccacaactgcggcaagcttggccactgggccagggattgtcggcagccacgacgtggccaggccaacgacgcacaggcggaggcggaggaggaggccctgctcctggcacatgcaagcatcgagccatctccagcggcaccggccgcagcggcactcctccaccttgatgagtcgaaagcacgcgctttcctcggcgacggctccaacaaggacatgatcgaaggatggtgcctcgacaccggcgccactcatcacatgaccggccgacgggagttcttcaccgagcttgactctagcgtccgaggctccgtcaagtttggggacgcctccggtgtagagatcaagggcgccggctcagtcgtcttcaccgccacgtctggtgagcacaggctgctcaccggagtctactacatccccgcgttgagaaactctatcatcagtttgggacagctggatgagaacggttcgcgcgtggaggtcgagcacggagtcatgaggatctgggatccctctcgtcgccttcttgccaaggtacgcaggagtgcaaatcggctttacatcctcaatgtgaaggtggcacaaccttgctgccttgctgctcgtcgagacgacggggcatggcagtggcacgagcgcttcgggcaccttaacttcgaagccttgaagcggctcagcgccaaggagatggtacgaggcctgccgtgccttgaccatgtggagcaattctgcgatgtctgcgtgttgacaaagtagagactgctccccttcccccagcagtcgagcttccgagccaaggagaggctcgagctcgtgcatggggacttgtgtggcccggtgacaccagccacaccaggaggacgacgctacttcttgctgctcgtcgacgatctctcccgctacatgtgggtgatgatccttggcagaaagggagaggctgcgaacgccatcaggcgtgtgcaggtcgctgcggaggcggagtgcggccgcaagctgtgatggaataagtcttgagcatctagaggacagcctgcttttgactgtcctctgtagtcctttagcatctagaggacagcttgactgtcctctgtagtctctttagcatctagaggacagcagtcgctttttgactgtcctctgtagtcgctttagcatctagaggacagcagtcgcttttgactgtcctctgtagtctctttagcatctagaggacaatcctgttgtatagtgtgtgtgagaaggtgtggtagtgcagcccctagggctataaatatgtgtccccaacccctctaagggtatggcattgtgtagtgtttgaggaaataaacagaaaattgccccaactcatagtgtcatcctcttgatgagagttagagtccctctacttacaattggtatcagagccaaactatcctgcagcctaaacatctcgtgttcatctccttcccgcgcctctccccacactcagtcggcagcaagagctccaactgttcctccctcccctgctcagacgagcagcctttcgtctgagacagcctcttccacacgcagcgacccctcactagcccgccatgtccctacgctcggccacttcgagtgcgcggcgccagcaggaggccgaggtcgccgcggcacaagaacgcgagcgagcagcagcagcggctgcagcgacagcgacgagggcagcacggttggcggcggcggaactggcagcggcgagagcggaagtagaagcagcggaggcggcggatgctgcacgtgcggcggcaacagagcttgaggttctgcgcggcagtagagctggcagctctgcttctgtcgacgacaacaccgacgaagagctcaggctggcgagggaagcagcgcgagagcaggcggcacagtgggcagtcgcgcatccccatgggggcgcgcgtggcggcagcccggataggcgtcgacacgctgacggcgctccaggcgggggcgcacgcggcggcagcccagacgggcgtagacgcgccggcggtgctcccggcggcggcgaccgagttgacggagatcgcggcctctacaggcggcgcggttctccctccccggatcggtaccatggtcgtcgcatggcccaagccattgtcagggacatcggtcccggcggtgggtggcctaccctcaccaagaccaactacgtcgagtgggccgtggtgatgagggtacggctccaggttcgccacatgtgggaagcagttcgttacgacgacgtcgactaccacgaggatcggcgggcgctggatgcccccattgctgcagtcccgcccgagatgcagttttcgctttcccagaagcggactgccaaggaggcctgggacgccatcgctgcgacccgcatcggcagcgatcgtgcccgcaagaccacactgcaggcacttcgcaaggagtgggagaacatgaccttcaagccaggtgaggatgttgatgactttgctctccgcctcaacactctgttgcagaagatggtgcagttcggcgacgacacctacgatgaggagagagctgttgagaagctcttccgttgcatccccgagaagtacaggcagattgctcgctcgatcgagtctctgctagacctctccacgatgacgatcgaagaggcgattggtcgcctcaaggtggtcgacggcgacgaaccacaggctctctctgggcctatccctatcggcgggaagctacatctcactcgggagcagtgggaggcctgccagggtgacaagaagcagggggagtcctcctcgacacgaggccgcaaacgcggcaagccgcgcaaggcgcgtggaggcgcccaggccggggcgcgaggacatgctgagggtggtgcacgtggaggtgcccaaggcggcgccgtcggcaacaagaagccggcacgagacgacggctgccacaactgcggcaagcttggccactgggccagggattgtcggcagctacgacgtggccaggccaacgtcgcacaggcggaggcggaggaggaggccctgctcctggcacatgcaagcatcgagccatctccagcggcaccggccgcagcggcactcctccaccttgatgagtcgaaagcacgcgctttcctcggcgacggctccaacaaggacatgatcgaaggatggtgcctcgacaccggcgccactcatcacatgaccggccgacgggagttcttcaccgagcttgactctagcgtccgaggctccgtcaagtttggggacgcctccggtgtagagatcaagggcgccggctcagtcgtcttcaccgccacgtctggtgagcacaggctgctcaccggagtctactacatccccgcgttgagaaactctatcatcagtttgggacagctggatgagaacggttcgcgcgtggaggtcgagcacggagtcatgaggatctgggatccctctcgtcgccttcttgccaaggtacgcaggagtgcaaatcggctttacatcctcaatgtgaaggtggcacaaccttgctgccttgctgctcgtcgagacgacggggcatggcagtggcacgagcgcttcgggcaccttaacttcgaagccttgaagcggctcagcgccaaggagatggtacgaggcctgccgtgccttgaccatgtggagcaattctgcgatgtctgcgtgttgacaaagtagagactgctccccttcccccagcagtcgagcttccgagccaaggagaggctcgagctcgtgcatggggacttgtgtggcccggtgacaccagccacaccaggaggacgacgctacttcttgctgctcgtcgacgatctctcccgctacatgtgggtgatgatccttggcagaaagggagaggctgcgaacgccatcaggcgtgtgcaggtcgctgcggaggcggagtgcggccgcaagctgtgatggaataagtcttgagcatctagaggacagcctgcttttgactgtcctctgtagtcctttagcatctagaggacagcttgactgtcctctgtagtctctttagcatctagaggacaacagtcgctttttgactgtcctctgtagtcgctttagcatctagaggacagcagtcgcttttgactgtcctctgtagtctctttagcatctagaggacaatcctgttgtatagtgtgtgtgagaaggtgtggtagtgcagcccctagggctataaatatgtgtccccaacccctctaagggtatggcattgtgtagtgtttgaagaaataaacagaaaattgccccaactcatagtgtcatcctctgatgagagttagagtccctctacttacaattggtatcagagccaaactatcctgcagcctaaacatctcgtgctcatctccttcccgtgcctctccccacactcagtcggtagcaagagctccaactgttccttcctcccctgctcaaacgagcagcctttcgtctgagacagcctcttccacacgcagcgacccctcactagcccaccatgtccctacgctcggccacttcgagtgcgcggcgccagcaggaggccgaggtcgccgcggcacaagaacgcgagcgagcagcagcagcggctgcagcgacagcggcgagggcagcacggttggcggcggcggaactggcagcggcgagagcggaagtagaagcagcggaggcggcggatgctgcacgtgcggcggcaacagagctcgaggttctgcgcggcagtagagctggcagctctgcttctgtcgacgacaacaccgacgacgagctcaggctggcgagggaagcagcgcgagagcaggcggcacagtgggcagccgcgcatccccatgggggcgcgcgtggcggcagcccggataggcgccgacacgctgacggcgctccaggcgggggcgcacgcggcggcagcccagacgggcgtagacgcgccggcggtgctctcggcggcggcgaccgagtcgacggagatcgcggcctctacaggcggcgcggttctccctccccggatcggtaccatggtcgtcgcatggcccaagccattgtcagggacatcggtcccgacggtgggtggcctaccctcaccaagaccaactacgtcgagtgggccgcggtgatgagggtacggctccaggttcgccacatgtgggaagcagttcgttacgacgacgtcgactaccacgaggatcggcgggcgctggatgctctcattgctgcagtcccgcccgagatgcagttttcgctttcccagaagcggactgccaagaaggcctgggacgccatcgctgcgacccgcatcggcagcgatcgtgcccgcaagaccacactgcagacacttcgcaaggagtgggagaacctggccttcaagccaggtgaggatgttgatgactttgctctctgcctcaacactctgttgcagaagatggtgcagttcggtgacgacacctacgatgaggagagagctgttgagaagctcttccgttgcatccccgagaagtacaggcagattgctcgctcgatcgagtctctgctagacctctccacgatgacgatcgaagaggcgattggtcgcctcaagggggtcgacggcgacgaaccacaggctctctctgggcctatcactatcggcgggaagctacatctcactcgggagcagtgggaggcctgccagggtgacaagaagcagggggagtcctcctcgacacgaggccgcaaacacggcaagccgcgcaaggcgcgtggaggcgcccaagccggggcgcgaggacatgctgagggtggtgcacgtggaggtgcccaaggcggcgccgtcggcaacaagaagccggcacgagacgacggctgccacaactgcggcaagcttggccactgggccagggattgtcggcagccacgacgtggccaggccaacgtcgcacaggcggaggcggaggaggaggccctgctcctggcacatgcaagcatcgagccatctccagcggcaccggccgcagcggcactcctccaccttgacgagtcgaaagcacgcgctttcctcggcgacggctccaacaaggacatgatcgaaggatggtgcctcgacaccggcgccactcatcacatgaccggccgacgagagttcttcaccgagcttgactctagcgtccgaggctccgtcaagtttggggacgcctccggcgtagagatcaagggcgccggctcagtcgtcttcaccgccgcgtctggtgagcacaggctgctcaccggagtctactacatccccgcgttgaggaactctatcatcagcttgggacagctggatgagaacggttcgcgcgtggaggtcgagcacggagtaatgaggatctgggatccctctcgtcgccttcttgccaaggtacgcaggagtgcaaatcggctttacatcctcaatgtgaaggtggcacaaccttgctgccttgctgctcgtcgagacgacggggcatggcagtggcacgagcgcttcgggcaccttaacttcgaagccctgaagcggctcagcgccaaggagatggtacgaggcctgccgtgccttgaccatgtggagcaattctgcgatgtctgcgtgttgacaaagcagagacgactccccttcccccagcagtcgagcttccgagccaaggagaggctcgagctcgtgcatggggacttgtgtggcccggtgaccccagccacaccaggaggacgacgctacttcttgctgctcgtcgacgatctctcccgctacatgtgggtgatgatccttggcagaaagggagaggctgcgaacgccatcaggcgtgtgcaggtcgctgcggaggcggagtgcggccgcaagctgtgatggaataagtcttgagcatctagaggacagcctgcttttgactgtcctctgtagtcctttagcatctagaggacagcttgactgtcctctgtagtctctttagcatctagaggacaatcctgttgtgtagtgtgtgtgagaaggtgtggtagtgcagcccctagggctataaatatgtgtccccaacccctctaagggtaatggcattgtgtagagtttgaggaaataaacagaaaattgccccaactcatagtgtcatcctcttgatgagagttagagtccctctacttacaattggtatcagagccaaactatcctgcagcctaaacatctcttgctcatctccttcccgcgcccctccccacactcagtcggcagcaagagctccaactgttccttcctcccctgctcagacgagcagcctttcgtctgagacagcctcttccacacgcagcgacccctcactagcccacgatgtccctacgctcggccacttcgagtgcgcggcgccagcaggaggccgaggtcgccgcggcacaagaacgcgagcgagcagcagcagcggctgcagcgacagcggcgagggcagcacggttggcggcggcggaactggcagcggcgagagcggaagtagaagcagcggaggcggcggatgctgcacgtgcggcggcaacagagctcgaggttctgcgcggcagtagagctggcagctctgcttctgtcgacgacaacaccgacgacgagctcaggctggcgagggaagcagcgcgagagcaggcggcacagtgggcagccgcacatccccatgggggcgcgcgtggcggcagcccggataggcgccgacacgctgacggcgctccaggcgggggcgcacgcggcggcagcccagacgggcgtagacgcgccggcggtgctcccggcggcggcgaccgagtcgacggagatcgcggcctctacaggcggcgcggttctccctccccggatcggtaccatggtcgtcgcatggcccaagccattgtcagggacatcggtcccggcggtgggtggcctaccctcaccaagaccaactacgtcgagtgggccgcggtgatgagggtacggctccaggttcgccacatgtgggaagcagttcgttacgacgacgtcgactcccacgaggatcggcgggcgctggatgctctcattgctgcagtcccgcccgagatgcagttttcgctttcccagaagcggacagccaaggaggcctgggacgccatcgctgcgacccgcatcggcagcgatcgtgcccgcaagaccacactgcaggcacttcgcaaggagtgggagaacctggccttcaagccaggtgaggatgttgatgactttgctctccgcctcaacactctgttgcagaagatggtgcagttcggcgacgacacctacgatgaggagagagctgttgagaagctcttccgttgcatccccgagaagtacaggcagattgctcgctcgatcgagtctctgctagacctctccacgatgacgatcgaagagtcgattggtcacctcaaggtggtcgacggcgacgaaccacaggctctctctgggcctatcactatcggcgggaagctacatctcactcgggagcagtgggaggcctgccagggtgacaagaagaagggggagtcctcctcgacacgaggccgcaaacgcggcaagccgcgcaaggcgcgtggaggcgcccaggccggcgcgcgaggacatgctgagggtggtgcacgtggaggtgcccaaggcggcgccgtcggcaacaagaagccggcacgagacgacggctgccacaactgcggcaagcttggccactgggccagggattgtcggcagccacgacgtggccaggccaatgtcgcacaggcggaggcggaggaggaggccctgctcctggcacatgcaagcatcgagccatctccagcggcaccggccgcagcggcactcctccaccttgatgagtcgaaagcacgcgctttcctcggcgacggctccaacaaggacatgatcgaaggatggtgcctcgacaccggcgccactcatcacatgaccggccgacgggagttcttcaccgagcttgactctagcgtccgaggctccgtcaagtttggggacgcctccggcgtagagatcaagggcgctggctcagtcgtcttcaccgccgcgtctggtgagcacaggctgctcaccggagtctactacatccccgcgttgaggaactctatcatcagcttgggacagctggatgagaacggttcacgcgtggaggtcgagcacggagtcatgaggatttgggatccctctcgtcgccttcttgccaaggtacgcaggagtctaaatcggctatacatcctcaatgtgaaggtggcacaaccttgttgtcttgctgctcgtcgagacgatggggcatggcagtggcacgagcgctttgggcaccttaacttcgaggccctgaagcggctcagtgccaaggagatggtacgaggcctgccgtgccttgaccatgtggagcaattctgcgatgtctgcgtgttgacaaagcagagatggctcccctttccccagcagtcgagcttccgagccaaggagaggcttgagctcgtgcatggggacttgtgtggcccggtgacaccagccacaccaggaggacgacgctacttcttgctgctcgtcgacgatctctcccgctacatgtgggtgatgatccttggcagcaagggagaggctgcgaacgccatcaggcgtgtgcaggtcactgcggaggcggagtgcggccgcaagctgcgcgtgctgcgcaccaacaacggcggcgaattcacgacggctgagttcgcgtcgtactgcgcggatgagggcgttcagcgccactactccgcgccgtacagcccgcagcagaacggcgtcgtcgagcggcgcaaccagacggttgtggggatggctcgggctctcctcaagcagagaggaatgccagctgtcttctggggagaggcggtggtgacagcgggttacatcctcaaccgctcgcccaccaaggctctcaacgggatgacaccgtacgaggcttggcatgggcgcaagccggcggtctctcacctacgggtcttcggctgcctcgcgttcaccaaggagcttggccacatcagcaagctcgacgataggagcaccccgggggtgttcattggctacgcggagggctcgaaggcctaccgcatctttgacccaagaacacagcgtgtgcgcacggcgcgcgacgtagtgttcgacgaagggcgaggttgggcgtgggacaaggcggtggacgacggcacgactccgacgtacgacttcaccatcgagtacgtccactttgagggagctgggggagtaggcaactcttctccgagcaggtctaccccagcccccaagtctccaccgcctccagcgccactctctccagctcctgctacaacgagctcttcaccaccacgcactccagccacgactccggctacagcgagctcttcgccaccacgtactccagcaccgacggtaccctctccgggaacgtcctctccgacaccagctcgtgtcgagcacgacccagtggagctcgtgacccctctgtcccgcgacgaggagcgcgtcgacgcgtgctacgccggcgagccgttgcggtatcgaagggtggagggccttctcatcgacccgtcggtgccaggccctgcatctcgcattctggcaggagagttgcatcttgcatgcgacgatggtgagcctcggtctttcgcggaggccgagcaacatgcggcttggcgtgccgcgatgcagtcggagatggacgcggttgagacgaaccgcacttgggagctcgctgatctccctcatggtcatcgcgcgatcacccttaagtgggtgttcaaactgaagagggatgaagccggcgccatcgtcaagcataaggctcgcttggtggcacgcggtttcttgcagcaggaggggatcgacttcgacgatgccttcgcccctgtagcacggatggaatccgtgcgactccttgcgctggcagccctggagggctggcatgttcatcacatggatgtcaagtcggcgtttcttaacggcgacttaaaggaggaggtctatgtacaccagccgccaggttttgcgatccctggcaaggagggcaaggtgttgcgcctgcgcaaggctctctacggcttgcgacaggcaccaagggcgtggaatgccaagctggattccacgctcaagaggatgggcttcatgccaagcccgcacgaggcggccatctatcgacggggcaatggagaaaatgccctgctggtgggtgtctacgtcgacgacttggtgatcaccggcgccaaggatgcagaggtggcagcgttcaaggaagagatgaaggccaccttccaaatgagtgacctggggcatctctccttctacctggggattgaggtgcaccagggagactccgggatcacacttcgccagaccgcctacgccaagcgcattgttgagctggctgggctcatcgactgcaacccagctctcactccgatggaggagaggctgaagctgagtcgcgacagcacgacgaaggaggtggatgctacacagtaccggcgtcttgtggggagccttcgctacctcgtccacacacggcctgacttggcatactccgtcggctacgttagtcggtttctgcagcgatcgacgacggagcatgagcaggctgtgaagaggatcatccgctatgttgcggggactctcgaccacggtctctactacccgaggtgccctggggaggcacaccttgtcgggtacagcgatagcgaccacgccggcgacatcgacaccagcaagagcacaagcgggatcctcttcttcctcggcaagtgccccatcagctggcagtcggtcaagcagcaggtggtggccatgtccagctgcgaggccgagtacatagcagcgtccactgcttcgactcaggctctctggctggctcgactgctcggtgatctcctcgggagagacactggagcggtggaactcagggtggacagccagtccgctctggcattggccaagaaccccgtgttccatgaacggagcaagcacatccggctgagataccacttcatccgagactgcttggcagaagggagcatcaaggcgtgctacatcaacaccaaggatcagcttgcagacctgctcaccaagccccttgggaagatcaagtttgttgagctttgctccaggtccgggatggcccaactttctcacaagacgacgcccaagacttagggggagaatgatggaataagtcttgagcatctagaggacagcctgcttttgactgtcctctgtagtctctttagcatctagaggacagcagtcgctttttgactgtcctctgtagtcgctttagcatctagaggacagcagtcgcttttgactgtcctctgtagtctctttagcatctagaggacaatcctgttgtatagtgtgtgtgagaaggtgtggtagtgcagcccctagggctataaatatgtgtccccaacccctctaagggtatggcattgtgtagtgtttgaggaaataaacagaaaattgccccaactcatagtgtcatcctcttgatgagagttagggtccctctacttacaagctgcgcgtgctgcgcaccgacaacggcggcgaattcacggcggctgagttcgcgtcgtactgcgcggatgagggcgttcagcgccactactccgcgccgtacagcccgcagcagaacggtgtcgtcgagcggcgcaaccagacggttgtggggatggctcgagctctcctcaagcagagaggaatgccagctgtcttctggggagaggcggtggtgacagcggtttacatcctcaaccgctcgcccaccaaggctctcaacgggatgacaccgtacgagacttggcatgggcgcaagccggcggtctctcacctacgggtcttcggctgcctcgcgttcaccaaggagcttggccacatcagcaagctcgacgataggagcaccccgggggtgttcattggctacgcggagggctcgaaggcctaccgcattcttgacccaagaacacagcgtgtgcgcacggcgcgcgacgtagtgttcgacgaagggcgaggatgggcgtgggacaaggcggtggacgacggcacgactccgacgtacgacttcaccatcgagtacgtccaatttgagggagctgggggagtaggcaactcttctccgagcaggtctaccccagcccccaagtctccaccaactccagcgccacactctctagctcctgctacaacgagctcttcaccaccacgcactccagccacgactccggctacagcgagctcttcgccaccacgtactccagcaccgacggtaccctctctgggaacgtcctctccgacaccagctcgtgtcgagcacgacccagtggagctcgtgacccctctgtcccgcgacgaggagcgcgtcgacgcgtgctacgccggcgagccgttgcggtatcgaagggtggagggccttctcatcgacccgtcggtgccaggccctgcatctcgcattctggcaggagagttgcatcttgcatgcgacgatggtgagcctcggtctttcgcggaggccgagcaacatgcggcttggcgtgccgcgatgcagtcggagatggacgcggttgagacgaaccgcacttgggagctcgctgatctccctcatggtcatcgcgcgatcacccttaagtgggtgttcaaactgaagagggatgaagccggcgccatcgtcaagcataaggctcgcttggtggcacgcggtttcttgcagcaggaggggatcgacttcgacgatgccttcgcccctgtagcacggatggaatccgtgcgactcctcctcgcgttggcagccctgaagggctggcatgttcatcacatggatgtcaagtcggcgtttcttaacggcgacttaaaggaggaggtctacgtacaccagccgccaggttttgcgatccctggcaaggagggcaaggtgttgcgtctgcgcaaggctctctacggcttgcgacaggcaccaagggcgtggaatgccaagctggattccacgctcaagaggatgggcttcatgccaagcccgcacgaggcggccatctatcggcggggcaatggaggaagtgccctgctggtgggtgtctacgtcgacgacttggtgatcaccggcgccaaggatgcagaggtggcagcattcaaggaagagatgaaggccaccttccaaatgagtgacccggggcacctctccttctacctggggattgaggtgcaccagggggactccgggatcacacttcgccagaccgcctacgccaagcgcattgttgagctggctgggctcaccgactgcaacccagctctcactccgatggaggagaggctgaagctgagtcgcgatagcacgacggaggaggtggacgctacacagtaccggcatcttgtggggagccttcgctacctcgtccacacacagcctgacttggcatactccgtcggctacgttagtcggtttctgcagcgaccgacgacggagcatgagcaggctgtgaagaggatcatccgctatgttgcggggactctcgaccacggtctctactacccgaggtgccctggggaggcacaccttgtcgggtacagcgatagcgaccatgccggcgacatcgacaccagcaagagcacaagcggaatcctcttcttcctcggcaagtgccccatcagctggcagtcggtcaagcagcaggtggtggccatgtccagctgcgaggtcgagtacatagcggcgtccactgcttcggctcagacgctctggctggctcgactgctcggtgatctcctcgggagagacactggagcggtggaactcagggtggacagccaatctgctctggcattggccaagaaccccgtgttccatgaacggagcaagcacatccggctgagataccacttcatccgagcctgcttggcagaagggagcatcaaggcgcgctacatcaacaccaaggatcagcttgcagacctgctcaccaagccccttggtaagatcaagtttgttgagctttgctacaggtccgggatggcccaactttctcacaagacgacgcccaagacttagggggagaatgatggaataagtcttgagcatctagaggacagcctgcttttgactgtcatctgtagtcctttagcatctagaggacagcttgactgtcctctgtagtctatttagcatctagaggacagcagtcgcttttttgactgtcctctgtagtcgctttagcatctagaggacaacagtcgcttttgactgtcctctgtagtcgctttagcatctagaggacaatcctgttgtgtagtgtgtgtgagaaggtgtggtagtgcagcccctagggctataaatatgtgtccccaacccctctaagggtatgccattgtgtagtgtttgaagaataaacagaaaattgccccaactcatagtgtcatcctcttgatgagagttagagtccctctacttacagagccatctccagcggcaccggccgcagcggcactcctccaccttgatgagtcgaaagcacgcgttttcctcggcgacggctccaacaaggacatgatcgaaggatggtgcctcgacaccggcgccactcatcacatgaccggccaacgggagttcttcaccgagcttgactctagcgtccgaggctccgtcaagtttggggacgcctccggcgtagagatcaagggcgccggctcagtcgtcttcaccgccgcgtctggtgagcacaggctgctcaccggagtctactacatccccgcgttgagtaactctatcatcagcttgggacagctggatgagaacggttcgcgcgtggaggtcgagcacggagtcatgaggatctgggatccctctcgtcgccttcttgccaaggtacgcaggagtccaaatcggctatacatcctcaatgtgaaggtggcacaaccttgctgccttgctgctcgtcgagacgacggggcatggcagtggcacgagcgcttcgggcaccttaacttcgaagccctgaagcggctcagcgccaaggagatggtacgaggcctgccgtgccttgaccatgtggagcaattctgcgatgtctgcgtgttgacaaagcagagacgactcccctttccccagcagtcgagcttccgagccaaggagaggctcgagctcgtgcatggggacttgtgtggcccggtgacaccagccacaccaggaggacgacgctacttcttgctgctcgtcgacgatctctcccgctacatgtttgtgatgatccttggcagcaagggagaggctgcgaacgccatcaggcgtgtgcaggtcgctgcggaggcggagtgcggccgcaagctgcgcgtgctgcgcaccgacaacggcggcgaattcacggcggctgagttcgcatcgtactgcgcggatgagggcgttcagcgtcactactccgcgccgtacagcccgcagcagaacggcgtcgtcgagcggcgcaaccagacggttgtggggatggctcgggctctcctcaagcagagaggaatgccagctgtcttctggggagaggcggtggtgacagcgggttacatcctcaaccgctcgcccaccaaggctctcaacgggatgacaccgtacgaggcttggcatgggcgcaagccggcggtctctcacctacgggtcttcggctgcctcgcgttcaccatggagcttggccacatcagcaagctcgacgataggagcaccccgggggtgttcattggctacgcggagggctcgaaggcctaccgcattcttgacccaagaacacagcgtgtgcgcacggcgcgcgacgtagtgttcgacgaagggcgaggatgggcgtgggacaaggcggtggacgacggcacgactccgacgtacgacttcaccatcgagtacgtccaatttgagggagctgggggagtaggcaactcttctccgagcaggtctaccccagcccccaagtctccaccaactccagcgccacactctctagctcctgctacaacgagctcttcaccaccacgcactccagccacgactccggctacagcgagctcttcgccaccacgtactccagcaccgacggtaccctctccgggaacgtcctctccgacaccagctcgtgtcgagcacgacccagtggagctcgtaacccctctgtcccgcgacgaggagcgcgtcgacgcgtgctacgacggcgagccgttgcggtatcgaagggtggagggccttctcctcgacccgtcggtgccaggccctgcatctcgcattctggcgggagagttgcatcttgcatgcgacgatggtgagcctcggtctttcgcggaggccgagaaacatgcggcttggcgttctgcgatgcagtcggagatggacgcggttgagacgaaccgcacttgggagctcgctgatctccctcatggtcatcgcgcgatcacccttaagtgggtgttcaaactgaagagggatgaagtcggcgccatcgtcaagcataaggctcgcttggtggcacgcggtttcttgcagcaggaggggatcgacttcgacgatgccttcgcccctgtagcacggatggaatccgtgcgactcctcctcgcgctggcagccctggagggctggcatgttcatcacatggatgtcaagtcggcatttcttaacggcgacttaaaggaggaggtctacgtacaccagccgccaggttttgcgatccctggcaaggaaggcaaggtgttgcgcctgtgcaaggccctctacggcttgcgacaggcaccaagggcgtggaatgccaaactggattccacgctcaagaggatgggcttcatgccaagcccgcacgaggcggccatctatcggcggggcaatggagaaaatgccctgctggtgggtgtctacgtcgatgacttggtgatcaccggcgccaaggatgcagaggtggcagcattcaaggaagagatgaaggccaccttccaaatgagtgacccggggcacctctccttctacctggggattgaggtgcaccagggggactccgggatcacacttcgccagaccgcctacgccaagcgcattgttgagctggctgggctcaccgactgcaacccagctctcactccgatggaggagaggctgaagctgagtcgcgatagcacgacggaggaggtggacgctacacagtaccggcgtcttgtggggagccttcgctacctcgtccacacacagcctgacttggcatactccgtcggctacgttagtcggtttctgcagcgaccgacgacggagcatgagcaggctgtgaagaggatcatccgctatgttgcggggactctcgaccacggtctctactacccgaggtgccctggggaggcacaccttgtcgggtacagcgatagcgaccatgccggcgacatcgacaccagcaagagcacaagcggaatcctcttcttcctcggcaagtgccccatcagctggcagtcggtcaagcagcaggtggtggccatgtccagctgcgaggtcgagtacatagtggcgtccactgcttcggctcagacgctctggctggctcgactgctcggtgatctcctcgggagagacactggagcggtggaactcagggtggacagccaatccgctctggcattggccaagaaccccgtgttccatgaacggagcaagcacatccgactgagatagcacttcatccgagcctgcttggcagaagggagcatcaaggcgcgctacatcaacaccaaggatcagcttgcagacctgctcaccaagccccttggtaagatcaagtttgttgagctttgctccaggtccgggatggcccaactgtctcacaagacgacgcccaagacttagggggagaatgatggaataagtcttgagcatctagaggacagcctgcttttgactgtcatctgtagtcctttagcatctagaggacagcttgactgtcctctgtagtctctttagcatctagaggacagcagtcgcttttttgactgtcctctgtagtcgctttagcatctagaggacaacagtcgcttttgactgtcctctgtagtcgctttagcatctagaggacaatcctgttgtgtagtgtgtgtgagaaggtgtggtagtgcagcccctagggctataaatatgtgtccccaacccctctaagggtatgccatagtgtagtgtttgaagaaataaacagaaaattgccccaactcatagtgtcatcctcttgatgagagttagagtccctctacttacagagccatctccagcggcaccggccgcagcggcactcctccaccttgatgagtcgaaagcacgcgttttcctcggcgacggctccaacaaggacatgatcgaagaatggtgcctcgacaccggcgccactcatcacatgaccggccaacgggagttcttcaccgagcttgactctagcgtccgaggctccgtcaagtttggggacgcctccggcgtagagatcaagggcgccggctcagtcgtcttcaccgccgcgtctggtgagcacaggctgctcaccggagtctactacatccccgcattgagtaactctatcatcagcttgggacagctggatgagaacggttcgcgcgtggaggtcgagcacggagtcatgaggatctgggatccctctcgtcgccttcttgccaaggtacgcaagagtccaaatcggctatacatcctcaatgtgaaggtggcacaaccttgctgccttgctgctcgtcgagacgacggggcatggcagtggcacgagcgcttcgggcaccttaacttcgaggccctgaagcggctcagtgccaaggagatggtgcgaggcctgccgtgccttgaccatgtggagcaattctgcgatgtctgcgtgttgacaaagcagagacggctcccctttccccagcagtcgagcttccgagccaaggagaggctcgagctcgtgcatggggacttgtgtggcccggtgacaccagccacaccaagaggacgacgctacttcttgctgctcgtcgacgatctctcccgctacatgtgggtgatgatccttggcagcaagggagaggctgcaaacgccatcaggcgtgtgcaggtcgctgcggaggcggagtgcggccgcaagctgcgcgtgctgcacaccgacaacggcggcgaattcacggcggctgagttcgcgtcgtactgcgcggatgagggcgttcagcgccactactccacgccatacagcccgcagcagaacggcgtcgtcgagcggcgcaaccagacggttgtggggatggctcgggctctcctcaagcagagaggaatgccagctgtcttctggggagaggcggtggtgacagcgggttacatcctcaaccgctcgcccaccaaggctctcaacgggatgacaccgtacgaggcttggcatgggcgcaagccggcggtctctcacctacgggtcttcggctgcctcgcgttcaccaaggagcttggccacatcagcaagctcgacgataggagcaccccgggggggttcattggctacgcggagggctcgaaggcctaccgcatccttgacccaagaacacagcgtgtgcgcacggcgcgcgacgtagtgttcgacgaagggcgaggatgggcgtgggacaaggcggtggacgacggcacgactccgacgtacgacttcaccatcgagtacgtccactttgagggagctgggggagtaggcaactcttctccgagcaggtctaccccagcccccaagtctccaccgactccagcgccacactctccagctcctgctacaacgagctcttcaccaccacgcactccagccacgactccggctacagcgagctcttcgccaccacgtactccagcaccgacggtaccctctccgggagcgtcctctccgacaccagctcgtgtcgagcacgacccagtggagctcgtgacccctctgtcccgcgacgaggagcgcgtcgacgcgtgctacgacggcgagccgttgcggtatcgaagggtggagggccttctcatcgacccgtcggtgccaggccctgcatctcgcattctggcaggagagttgcatcttgcatgcgacgatggtgagcctcggtctttcgcggaggccgagaaacatgcggcttggcgtgctgcgatgcagtcggagatggacgcggttgagacgaaccgcacttgggagctcgctgatctccctcatggtcatcgcgcgatcacccttaagtgggtgttcaaactgaagagggatgaagccagcgccatcgtcaagcataaggctcgcttggtggcacgcggtttcttacagcaggaggggatcgacttcgacgatgccttcgcccctgtagcacggatggaatccgtgcgactcctccttgcgctggcagccctggagggctggcatgttcatcacatggatgtcaagtcggcgtttcttaacggcgacttaaaggaggaggtctacgtacaccagccgccaggttttgcgatccctggcaaggagggcaaggtgttgcgcctgcgcaaggctctctacggcttgcgacaggcaccaagggcgtggaatgccaagctggattccacgctcaagaggaagggcttcatgccaagcccgcacgaggcggccatctatcggcggggcaatggagaaaatgccctgctggtgggtgtctacgtcgacgacttggtgatcaccggcgccaaggatgcagaggtggcagcattcaaggaagagatgaaggccaccttccaaatgagtgacttggggcatctctccttctacctggggattgaggtgcaccagggagactccgggatctcacttcgccagaccgcctatgccaggcgcattgttgagctggctgggctcaccgactgcaacccagctctcactccgatggaggagaggctgaagctgagtcgcgacagcacgacggaggaggtggatgctacacagtaccggcgtcttgtggggagccttcgctacctcgtccacacacgacctgacttggcatactccgtcggctacgttagtcggttcttgcagcgaccgacgacggagcatgagcaggctgtgaagaggatcatccgctatgttgcggggactctcgaccacggtctctactacccgaggtgccctggggaggcacaccttgtcgggtacagcgacagcgaccacgccggcgacatcgacactagcaagagcacaagcgggatcctcttcttcctcggcaattgcctcattagctggcagtcggtcaagcagcaggtggtggccatgtccagctgcgaggccgagtacatagcggcgtccactgcttcgactcaggcgctctggctggctcgactgctcgnnnnnnnnnnnnnnnnnnnnnnnnnnnnnnnnnnnnnnnnnnnnnnnnnnnnnnnnnnnnnnnnnnnnnnnnnnnnnnnnnnnnnnnnnnnnnnnnnnnnnnnnnnnnnnnnnnnnnnnnnnnnnnnnnnnnnnnnnnnnnnnnnnnnnnnnnnnnnnnnnnnnnnnnnnnnnnnnnnnnnnnnnnnnnnnnnnnnnnnnnnnnnnnnnnnnnnnnnnnnnnnnnnnnnnnnnnnnnnnnnnnnnnnnnnnnnnnnnnnnnnnnnnnnnnnnnnnnnnnnnnnnnnnnnnnnnnnnnnnnnnnnnnnnnnnnnnnnnnnnnnnnnnnnnnnnnnnnnnnnnnnnnnnnnnnnnnnnnnnnnnnnnnnnnnnnnnnnnnnnnnnnnnnnnnnnnnnnnnnnnnnnnnnnnnnnnnnnnnnnnnnnnnnnnnnnnnnnnnnnnnnnnnnnnnnnnnnnnnnnnnnnnnnnnnnnnnnnnnnnnnnnnnnnnnnnnnnncgagagctgtctcactgagttgtgagtttgaagcagtctttccgcatttgcgcggggggggggtgatggaataagtcttgagcatctagaggacagcctgcttttgactgtcctctgtagtcctttagcatctagaggacaacagtcgctttttgactgtcctctgtagtctctttagcatctagaggacaacaatcgcttttgactgtcctctgtagtcgctttagcatctagaggacagcagtcgctttttgactgtcctctgtagtctctttagcatctagaggacaatcctgttgtgtagtgtgtgtgagaaggtgtggtagtgcagcccctagggctataaatatgtgtccccaacccctctaagggtatagcattgtgtagtgtttgaggaaataaacagaaaattgacccaactcatagtgtcatcctcttgatgagagttagagtccctctacttacagggggagacttgtctcggtttatccctcccttagaccccactcatgtgggagcctccgacattggatgtactctatttgttttaaatatatgcagataaatattattttctaacaatggtgctaattcatgtataaaagtaaggagtaaaatgcatcaggtccccgaactctcaaaactaggattacgtgtcttcgaacttgacgtcttggccggtcatccaaaaccagatttgctcaaactggatgccgatgtggcgtgccatgttggagtcactttggtccccgaacttggcatgctgtatcacttgggtctcagaacttggcattttgtgccacttggcttcccgaactttctttagtacgcttcagcgtggcatgctacgttggcatcgggtttgaacaaactcggttttggatggccgactaagttcgaggacccgttttgctggttttgaaaattcgatgacccaagtgacaaatcatgctaagttcgaggaccactgatgtattttactcaaagttaagttttgggatgtgtttattgggctagggcatgctagtggggtttctctcgttgcaaaacaggggcttgtttgcaaatagttctaaaggcaccttgtgtgtgaaatgtgggttctgtgtgccaatgtcaacaagttttatggatcttgattatagatcgaattgctagaaatatagtagttcaaacagatattggaactggagctacaatttagtcattaatatactattacttcaagtatgtatgggtatcaactatcaaacataggttgtgtttgcttcagcatctgaaaagtgcttctgctctactttattgtattacaatttaactagcaccttggactatacttttggcttccaaccttttacttctccaaatggttggaaacagaaagaaattttacatgtgtatccagggcatgcttatcaagacgtccattaagcgtcacattagagtcgctttagcgctaaggcgcactcacagggcaaggcgtctagcttgccttgtgctggggagtaagacgtccgccgcggcgtaaggcgctggtggggcgtcggcagggcgttctcggagcgtcggcggggcgacgcttaggggataggtagggttttgaagggcgacggctggaaacagagaagagggtttgacctgtgtctgtgtggcagctgcagctgctgcctccttcctcgtcggcgcgcagtgctccggccatcggaggtgggagactgcggtggaagaaccgagggagagagagagaggagagctgtgggggagggagagagaggggactgaagagagatgcagcgtgagggaaaaatagaggctggcggctgctactaggttgctggcggctgtgacctaaaactgtgttttgggctgagctgggccgagttgggctggactcacttgttgtgaggttctttcctgccttttttttctgcttctactagactgaaattggacatattagaccttataaaagtgctagcttgcttattaactttaaattagtgatatataaataatgtttgatctaatttttttgatatttatctatataactaaggcctcgcctcgccttacgctttatcgcctaaaagataaaagagggttggtcgccttatgtcgccttaccgccttaataactatgatcaagggagagaaagaaaggggtaggcttcatagttgtttcaaccaaacaatttatctttttcatagtgcatagctcacatcatcttttccaaagctcacaactcacaacaacttttctatagcttagttgacccaaacaagcccataattgctttttgtttggacctaccagctaattactcatgtgagagcctctgacactaggtttgtcctactaactaactacacaacacatcataggtacgtaacctttagctctctagaaaacttgggcaagtaattcagccaccctgaaatggtgctctataaatgtctcggcttgccaaattttgtttgggccagccaaaatttgacctccaccttgggctcaactctctgaccatattgggcgcttggatcatatggaatggaaccactgtaactgttgttttattgatttttttctcgaaaagcgcaggagaactgcaccccattatattaagaccgttgtttttattgatgctaagtgtttctgaagccatgatcgtggcaggagaagagcgtcaactttggtctatgacaggggctagaggaatctcctgcttgattgtccccaaggttttgagtgcttttttagatgggacattctatgtctcctttttaatcagtgtgtttgtaactattaaatgtggtgtttgttgtgtgggttgtggttcctaaccgaatttcttcttaatataataaagtgccatctctactgcattttcgagaactttttttgacctccaagtggttgccagattgttggggcacgaccaaattttgattttgcatcctatgagtctcatactaaacgtgtcgtgaatatccttgttttatccatgatcattcatttattcatttgcttgtgccttctgtgtagacatgttttttttgcaggtatatgtgtggttgcacactcataagttgcagttgctactaccttgttagttagtctatggttttgctgctttgattgaaccaaaataaaatgttagttgcaaacttttgtcaactcagctgtgtctgtcatttgtttagtattgtcctccattatcattaaggatcagagactttgtaaatggattagtttttcatgaatgttatgatgaaaaatgatattgttctgttctttaaatatattctttgctcgcaacttatattaattgtccttgggctatgttctcatgtctattgcaggttgaatgtttacttgtagaaggtgtcttgggcaaaaggaatcttgtgtattgtgcatccacgaggtgtttgcagatctttcatgtcgttcatacatggacatacctacacacttcacattctcagatgcgtactgtttttttttcaaattccttttctatctaatcttatgtgtatattttttgttgttaaatttgcagtgctggtaaaagttttgttgctgaagttctgatgttgaggcagatactgtcaactgggaatatggcaattcttgtccttccctatgtgtcaatatgcgctgaaaaggtttttgatgatttatacagctttggattggtctgaaacatacttgtgtttgattatttatttatcttttacaggctgaacatcttgaacaacttcttgagccactgggtaggcatgtccgtagcttctacggaaaccaggggggaggctcacttcctaaagatacagcagttgctgtatgtaccatagagaaggcaaactctttggtaaacaagttgttggaggatggccgcctctctgaacttggtgtaattgtcatagatgaacttcatatggtaagcttgtctaaaaccgaagtgctgctcagaacatcctctctttgctttaaaccttttgttgttggtactttcatggttatttataccacatctattttgttatgcaagttcattgccttaggaactgtcatttcagcaatctaggtttgtgacagcattgagagtactaacgtaattttgtaacatttccattgtttgtaatcttttaatagcatgcacgagataattgccatttaatgaggatatttgttggcctgttgttagctattagtgctccttggccagtgtgcattgtggaattggatttgttttatgaaacagatggagcactagagatctggtactatctggaatctaaaaagtagagcgtgtgcattttgtatgactttcttctttaattaatacaatgatacagaactctcctgcatattgaagaaaaaacgatgtacaattgcattgcaagtagtagaggttttatcattgctaactaagagcactacaaattcttgtataggtggtgtatgtggtattggtgtactgcatatatcaatcagaacttcaaatatgatttttcctctcccccttctctccgcctgggccgttagggagtgaattcagtccaacgcctaggggctagggccaccaatctagtccaagtgatgtacctttccctactgcatcattgtttagttttttaggtgttcttttttgttcaaggtttgggatggttagtcatcaacttatcacccatcctatctaatcaagtaatcttgtgtgttactttacctgttacccgagtttccatattgttaggttataatcattaagagtaatttgtaaataagaaaggtttgtcattatggacaattgccagtaaacaagaaacaacaaggagaagtaccattggtcctggcgctgaatgaattctggcagcatacttatcaaatgcaaatcatataggaagatttgactttccttagggctcccctcatatatttgtaatattaggcccaggaccaatagtctcccagctcgccattcggctaaagcactatggcagtattactatttagcaacccctaccaaaggaagcatatagcttgcatctttacctgtctttgtttacctttccatgcccttgagggttctttcaatctttcttcctgtatcctttgacttagtttgtcgaacatgatgtgatatatagttgaaacttgttaagttctccaattatgcaattaaattaacaggttggtgaccaacatagaggatatcttttagagctgatgttgacaaagcttcgatatgctgctggtgaagggactttacagtcatgtagcggagaagtttcaagttctagcagtgggaagattgcaagtcatgggttgcagataattggtatgagtgctactatgcccaacatcgctgcggtggctgattggcttcaagtaagatatttaattctcctagttttatgtacttaatgaagggatgttttactagtgtgagaaacaacattactaacccacagaagttcaacttagcattgtcgttcatttatcatattagaaagttcaaaggcatttgataaatatgtgagcaattgaacttcctaattccacttgtattttctttcatcaactttttaaggttttttttgctgtctttcttcaaacctatagcctaacatgatatcttcatcaatattatctgatcgtatgatcgaggctactcgtatgaccaccgatcatatgactaatcactattagtcatcgattagttggtctagccagctagtcgaacatttagttgtccatgtgcctagatgacctaatcgaccatgccgagttagtatccatcgctagtctccttcgcgtcgccccacatgggcaacacgggcggaaccaaccctagcaacgcaccttcttcctcacctgattctcctcaccgtcactagagcgcgacttcacaaggaaggcaatggcatgtcattctcctctgcctcgtgatcatcgactctatcaagctcctctaccatggtttgagaaggtgctcctcccagtggccaatctctagattctagatccaccgatctctaggccagacctgcgctggttgggcctatggtggccacacagtggcagtgcagttgtcccctctcctctcacaactcttcgttcgtctttggtgggtgatgcctagatccatcgtcactgtagccggatcaggcatctcccgtgacaacggatctgcggagggcgacaacccttgtggtcccaacttcattttcaagcatgttcgggtgcttctcggctctagcactcggtcaactttggcttggcattggcatgtggcgcaaatgcaatagcaactgcattgctagcttgcatggccaccaaggatgggtgctcttagtgaggcaaacaagtgccaaacctgcaaccatgacataggagatggtgggcttgctcaggcttgcgttggtgtttgtcggtacctcaagactagggtacccactcctactggatcaaggcgggacccctgtggctatccctagtcgcatagccacaggtggtccgccctggctcagaatataggttcgtccgacgaggccgctggcctcaggtgggggccaacttccatgttgggctcttcagatccctagcagcggggctccgaagccgccacatgctccaagtatggggactccctacagctttgcctaggggcctgaccccctctgggtggtcccggacacctgcgtatgctacttgaacctccgacttaaagaggtccggtattgccacgtgtttaggcccgtgccagagggtcccggactcctctgagtaccttccgaacccccaactagtggtgctccggatctgccacgtctacagacactcctggctgattgctccctgctcgggtaaagatccggtgctgccacgtgtcttatggcgtgtgacataagccgtcgggaagagcctggcgtaagcctctggcaaggggaagggccacctgtgttcaaggcgggcagagtgcgcggctgttcacacaagtaatagatggcgcgtaccccgcattaaatgtaggtggcgtgcgcaacctgcaaggcctgcccgcgtcagaatcgcgttaccaaggcaagcccattgcgtagcttggacgcccttcattatgacttctattcctcgcgtgttattgaggcatgagggaacaggcggaggggacgggatgacaccgtccttattctccctacgctcacctacgccgcaacctacgttgtagcctttgcccacatgtcgtagcccctcctcatcttaggattagggcgggtgttatccgtcacctgtctggagtttacctctgaccgtgttgatgtttgtgtggttcgtctctaggtggtctttatagggcacgacaaccatggttggctacaacgagccttgtttgtgggcgtagcttttcacctgcaatggctctgaactagctcgagagttgcatgcggtggtggacgacaatcaacttcaccaggactacatgagtaactatgttgactacacatgttggtgtgaggagagatcttggtgcaagatttggttagtattatcttgagtcgatgatgataacacctttggggggggtgccattcccttttttggaagcgtcgatgaggtgccgtctctccttaccccacgatttgttttgaagaagctctgcctagggtccctaggctggtgatggcggcgcccagcgtcgtatcctgcctgagggcatcaccttgatcccgtactaccatggttgttggtccgcatgggacatttgctgcttgtttgtaagcctcaggttttgatgagttcgctacttgcttaaagcatgtcttttgctctcctagggtagatcaataggtgaagtcagagctgcttttgtggggtgcaacaaagcttggcaatgatgacacattatgttcacttccttcaaaagccgggtcttgttgtgagtaggtggtggtgtgttagggctttggctgatgttcgttgtgggaaatcagatctacgtatcacttttgtgggataagctcgacatcgatgacgtgtggtgtgctctgttggttgtttttgtgtatgtgggttgcttaggattagtcgtatgggttgttgtgtttaggtattggccggttttcctttgataaactgtgtgatgtggtgttttatccctgggtttccttataacctaggtcaattctatttcttaattgaaacttcctagttcctactgcgttaaaaaatgacctgatcaaccatgtatataaataaatttgatataaattggtgaatgggagaggcaagcaaccaagcacattaataacatttccaccttcctctccggcgcggacgtcgcccacctctacgcgtctagcatcgccgccgccgctactacggctccccaggcgttcaccgtgaccaccgccgctgctgcagccactgcggctggactcctacccccaacctctatagcagcctcgacctccctggctacctgacctccacggccgccttcagtgccgcctcgacattcgggactctctccccgaccgacttctcccggcagtcgcccctcggtttcaccgcccgcctgtcgtcgacgtcacttgggctccaccacgtgccgtcgcgccgtccaacgactccgccttggtcgctgccatcgccaccatccaggccgccgtggccgcctcacaggagcgccaacgcgtcgcattactccctctggagcaggaatgggccatgggttaggccctgaccactcagctggccacggctcagcgtatgcttctcggtcgtggcaccccgccaccaccggcagtgcttgcggctcccctggtggtcccggagcctcctcatggctctgggcttgacgtcgacactatcgccgccctccacgcctaggccgctggggttcacaacatacagtccctcatgttggacccgacgtcctcccactaacctcactggcgcgctcaggtggtcctcacccttcggcgtttgccctcactgaccacgtcctcgacgatctcgttgcctcgctgtccccctcctgggtctagatggacaacgtggtcctatcgtggctcaacgacacaatcaccgttgagctgcaggacatcgtctgtgatcaggcagacactgcgcgccagacatggcttgctctcgagggccagttccccaggaaccaggaggctcgggtgctccacctcgacgtccagttccatctgttttctcaggggacctctctgtgggagagtactgccgccagatgaagggcatggcgaactctctccgcgacctcggtgagcctgtcgccgacaacaccaaggtgctgaaccttctacgtggcctcagcccccgctacggccaccggaaggctctcatcaagaggaccgtgcctcaactcccgctatggtcctctcatcaagaggaccatgccgtgcggaacgagcttctttttgagtagctcaccatggagaccgaggctcctccggcatcgacactctacaacgctcctcccggcggtcagacaccctcggggggccaggcctctcgctctccatcgaccgaggcccctgctcgccatccacccgctgtcattgcgactcctcgtccggctttcaccgccgacggaggtcgtcgctccctcaagggcggccgtggggtggcagctccacccgtggtggtccctccggccggggtggcggccaggcgtgaccgtcattctacaacccctggaccaggaccatcgccatgtggccgggctaggcctcgagtgcctcccgctttccggcgtcggccctccagacagcgcctccctacgacgtgccttcgatgcctccctacggcgtgccaccaacgcctccggccgcgccctagcacccgccccgaggaccaccacctcgacgccttggtccccgctggctggcggatggggccctgcatccctcgtcaccgccttcagcaccatggcgatgaccccaccccctccgactgggtggttgattccgagcttcttaccacacaactcccactgcagacacgctctctttgtcccatcccatccattcctcccacccctcctggatcctcgttggcaacgataccactttgccggtcacctcaataggtgcctcggttttccctgggccgttctatctcaacgacgttctcgtagcccctcacataactcacaatcttctttctgttcgtcggttcaccaccgacaacttttgttccattgagtttgacccctctggttttctgtgaaggatctagccacatgacccctctcacccgctgtgacagcgccaagcccctctacacgcttcggccttccaccaccgacgcgtctccacctcccgtcctggtctccaccaccacctctaccacgtgacatcattgtctcggccacccaggacctgatgtcatgaccaaacttaacaacaatttagatccttcatgtagtaggggacattttgatggtctctgtcatgcttgtcagttagaccgacatactcgtctcccattcaccactttttggtttgaggagtcttttgacctggttcattgtgatctctgtacctcccctatactcaatctctttggttataaatactatttggtcattttggatgatttttcccattttctttggacctttcctcttcggttgaagtccgacacgttcaccaccctcacacacttcttcacctaggtctccactcagttccgtcgcccggtccgtgccctacagtgtgacagtggccgcgagttcgacaaccatgcctcccgttctttctttctcaccaacggcgtccagttgcgtctctcgtgcccctacacctctttccagaacggccgggccgaccgcataactctttctcaccatttgctgccttctcttccaggcgtctgtccctgccagctactggggtgaggccctacacaccgccacacaccttctcaactctcttccctcgaaggcggtgagccaccctactcccacttcgccctgtacgacacaaccccttcctacgaccaccttcgcgtgtttggctgtgcctgttatgctaacacttccgccatcgctcctcataagctatctccttgctccactcgctgtctcttccttggctagtcccctgaccacaaagggtattgctgtcttgacctcagctcgcaccgtatcatcatctctcgtcatgtcgtcttcgacgaagatgtgtttccttttgctggctcctcccacccaccgatctcgactccctacttgagtctgatccggttacccctctataagtagatggactctaactctcatcaagaggatgacactataagttcgggcaattttctgtttatttcctcaaacactacacaatgccatacccatctaagggttggagacatatttatagccctagaggttgcactaccacaccttctcacacacactacacaacatgattgtcctctagatgctaaagagactacaaaggacagtcaaaaagcgattgttgtcctctagatgctaaagagactacagaggacagtcaaaaagcgactgttgtcctctagatgctaaagagactacagaggacagtcaaaaagcgactgctgtcctctagatgctaaagagactacagagtacagtcaaaaaacgactgttgtcctctgatgctaaagagactacagaggacagtcaaaaaaacgactgttgtcctctagatgctcaagacttattccatcagcctccaccctaggcgtcccgccttgcgccgttgcctgtaccatgtgcggcctcgacgcctccactcgcgcctctaccggcgcggcgacgacaccgtctacctcctgctctacgtcgatgatattgtgccgacatgcaccgtcgacctcctacagcgcacgatcgtcggccctcagcggtagtttgcgacgaaggacctggggcccctccaccacttcctcggcatcaccgccgaacgctggtcccagggtctcttccttcaccagcgccagtacgccatcgacatcctggagcgggctggcatattcgactgcaagccctgctccacgcctgtcgacacttaggcgaagctctctgaggacggcggcccccggtcgccgacgcgacgtcttaccggagcctgaccggtgcgctccattacctgaccttctctaggcccgacatcgcctacaccatccagcaggtgtgcctgcatatgcacaccccgcgggagccccatctcaccgctcaagcggatcctgtgctacctccgcggctacctcgactacgacctccttctccgaccatccccgacgtcggagctcgtggtctacaccgacgctgactgggccgattgtcccgacacgcgccggtccacttccagttctgccgtgttcctgggcgccaacctcgtctcctgggctgccatgcggcagctcgtcgtctcccgctccagcgccgaggtcgagtattgcgctgtggccaatggtgtggcagaggcctcctagatgcgccagctactacacgagctccacatctctcttcagcgcacaaccctcgtctcttgcggcaatgtcagtgcggtctacctctccaccaaccccgtgcatcatcagagcacgaagcatgtggagatcgacctgcagttcgtccgcgagcgtgtcactgcctgtgacgttcgggttctcagcgtccccaccacgctgcaatacgacgacatcttcaccaaggggttaccgtcgagtgtatttttagactctcgatctagtctcaacatctgatctgtacaagatagagttgcgggggggggggggggnnnnnnnnnngcagattttaaaataaaggtgcacagatttgcttcagctctcttcgcagcctctgtgtgttcggtggttggtaatggggcaaacactctcttctggacagataaatggcttcagggccaatctttgctccagattgcccccgcgctaataaatcgggtgcccgcgaatataagacggcgcagatctgtccaagcagccttaacagccaatggttgggtgcatgatatctctggaagccttacggcgcaggtgctgtttgaatttttattggtttgggatttactccaagaggtgcaactgtaccctaatgtggaggatcaacatcggtggttgccatcctcctcggggctgtattccgccagctctgcttatttgcgcttccatggtggtgcaacaacctttgagcctgctacaagaatctggaagacttgggcccccccgcgctgcaagtatttcatttggcttgcatctctcaaccgatgttggacggctgatcgactggcacgtcatggaatggatcatccagatagttgtcccttgtgtgatcagcaggatgagtcagtgcatcacttgctggtggattgtgtttttacgagggaagtttggtttacaacactaagcaggctaggtttgcaacatcttgctcccacgtctgatgctacannnnnnnnnngggggggggggggtgttagaattccatttacggtttggggttctcctcgtgtaattactctctcacccctgtgtaatgggccatgtcctgttaactcatgtctattaatacatcacccaaccccaagatagagttagggtttcccacactgtgtaatggactaggcctaacaacctgggtctattaatacaactcccaaccctgagttagggttaggttttcccacatgtaatagaggtaggttagtttctctcccccaccccatcccaaccgcccgcttctttcccagcctccggtcgccgtcagctgcatgctctagccgttgtccgccgtgtgctcctccctgtcgtcacatcctgcagccgccgaccccgccatggatcctccccaatccgtccctcccctctccttcgcgctggatgctagcgcggacgccgggcttggtgcgacggcagccgacctcgacatgcgcgccaccgcggccctcgacgcatgcacctcgcccgcgcaccgccgcgaacgccgccgccgtgtacgccgccctaggcgtgaccccctcatcggctgatctgcacggcgccataggcgtgtgccctcccttcgctagctcgctctttccccatggctcgtcgacccgctgcgctcgctgttggcccccctacatcgacggcctcgggcccctccgcggcgcctctcctacgaccttcgctgcacaacagcgccaaggttctctgcctggcttcctcgccctcgctgctcctacatggaccgaggacgtcgcttcctcgtcaggctcctccccaacttcctcgacattggttatggatatcgccaccatccaggcggctgttgcggcctcctaggaccgtgagcgcgccacgactcttgccttggagcgcgagcgcgccatggtgccgacttgaccacccagatggccgtcgcgcaacgcctcctcctcggtcgcagtaccaccccttcaccggtggcccctgggactccccatgcccaagggcttgatgctgacaccatcattaccctccatgcttaggtcgccggggtccacaacattcggtccctcgtgtgtgttatgctggacctggcgtcctcccactaccctcggtgtcgcgcttaggtcatcctcacgcttcggtgatactcccttgttgaccatgtcctcgacgaccccgtcgttccgctgtcaccttcgtgggtacagatggacaacgtgatcctctcgtggctcaacgacaccatcaccatcgagctacaagacatcgtccgtgactaggcgaacaacgcgtaccaggcgtggctcgctctcgagggccagttcctcgggaatcgggaggctcgggcgctccatctcgacgtccagttccacctgttctctcagggggatctctctgtgggagagtactgccgccagatgaagggcatgacaaactctctccgcgacctcggcgagcccatcgccggccatatcttggtgctgaaccttctacatggcctcagcccccgctacggccacctgaaggctttcatcaagaggatcgtgccttttcccacctttcatgctgtgccgaacgagcttctcctcgagggccccgccgatcacatctacgccgcatgaagcacgtgcagcatcagcacacggagcacatggagatcgatctgcactttgtccgtgagcgggtcaccgccggtgacgttcgggttctcagcgtccccaccaagctgcagttcgccgacatcttcaccaaggggctgccgtcgagtgtcttcgccgacttccgatccagtctcaacatctgtacaagatagagactgcggggggggggggnnnnnnnnnnnnnnnnnnnnnnnnnnnnnnnnnnnnnnnnnnnnnnnnnnnnnnnnnnnnnnnnnnnnnnnnnnnnnnnnnnnnnnnnnnnnnnnnnnnnnnnnnnnnnnnnnnnnngggggggggtgttagagtactgttagggtttcggggcttgtccctgtgtaattacttgcataccctcagtgtaatgagcttggcccatatagcactcccaactcagttagggttagggtttcattctccaacagttttgttcattatgagcacattttttgtcgacttgatttgttaatagtaagttattctgtgaaggtgctaacttttgatctgtttgggtaatatgaatgatttatagttgcatacctattataattgacgctatgtaatcttaggctgctctttatcaaactgactttcgaccagttccactggaggaattcataaaagttggtaatcaaatatttgataaagacatgaacgttgttcgtgtccttcccaaagtagctgaccatggtggcaaggatccagatcatattgttgaattgtgtaatgaggtaaatctgttatttacattgcaggtcttagtttttctctgttaaacactacaattttgaagcaaattgaatattgtacttgtatttgttccaggttgttcttcagggccattctgtgcttttgttttgctccagtcgtaaaggctgcgaatcaactgcaaggcatgttgccaagttcttgaaactaccctctgttggaacaactgatgttagttcggagttttcagatgctgcagctgctattgaggccttgaggaggtgccctgctggattggatccaatattgggagaaacccttccttttggtgttgcatatcatcatgctggtcttacggtatggaagctatcttctatcttcataagatacacaaaatatcaaatatatatatatatatatttatttatttgaaatttgcactgctaaatatgtgctaagtggtgagagtggtctcactaagccaccaggtcgcgggttcaaagcaaccccttcacatttgcgggggaagggttgccttggttttatcccttccctagaacttactcacatggcctccgtcactgggtctgccctttacactgctaaatttaataaagtgatgccatttttacctaaccacagctgggcaaagggtggtaggaactgatctgccattacctgttctgattgatccaatgagcgtcatcgccttctgttctgtggcaggtcgaggagagggagattgtggaatcatgctaccgtaaaggccttgtccgtgttctgactgccacttcaactttagctgctggtgttaacttgcctgctagacgggttatattcaggcagcccaagataggtcgtgattttattgatgggactcgctatagacagatggctggtcgtgctggtcgaactggaatagacacaaaaggagaaagtgtaagctacaatatctttgttccactttattctattagagaatggttctgacatttcactagttctgttttaattgtgtttttaactttagcctaccccaactgcttgggagaaaagggctttgttgttgttgtctaataatctgacatttgaaatgcatgcagatacttgtatgcaggcctgaagaggtcaagagagttacaggtattattagaagcaattgccctcccttggagtcctgcctctcagaagataaaaatggaatgactcatgcaattatggaggttgttgctggtgggattgttcaaactgcaaatgatattcatcgttatgtgcggtgtacgctgcttaattccacaagaccttttgatgatgtcgtgaagtcagctcaagactcccttcgttggttatgccataaaagctttcttgagtggaaccatgagaccaagatatactccgctactccccttggtagagctgcttttggaagttcactcaaccctgaggaatcattggtagcatacttgtcttttgctccttcattattttattgcattgagaaagggcctctagctgagttggttaggtggtctgagtagcactccttaggttctaggtttgactttccgtgggagcgaatatcagcctgtggttacctcccatttgtctgtcccacaccaaagcacaggtctaaggtcctgtctagatcgtagtcgtttctcaaatgggctacggtgccgctgtgtatgggtggggcaggggttcgggggttttctcgacctgcgtgagaaggtcttcttaatataatacccgagggctgtcttatcccccgcaggtcgagttttttttttattttattgcattgtttaatcttgcatttttctgtttctgcactaggttgttcttgatgatctttcgagggcaagagaaggctttgttctggcatctgatttacatttagtttacttggtcacacccataaatgtagaccttgaacctgattgggaattatattacgagaaattcatgcaactttcttctcttgagcaggtatgcaagtcttcttttgtcctattgcacttgaaagttcatttatcaaactgtaaatagaatatccagaaattcgagttctatctgtactcattagaaaatagttgaaagtgaattccgaaaacatgattttagttgctgttgaactaaatgtgtgaagcaaaagtgaattcagaaaatgcaaatcaaatttgttacggttataatagtcataatattagtgtaatcttctagtctagggtttccctcatgtttctcatgtactcttatagtgcttattcatccaattcagtgcttgttaatggaatgtgtgaagtctatttcggtatttttacataaccatgaatcagactaaaacatgcatatgtttattgaactccttcgcactgtacttggttgcagtttactacatatgttatttgacctggttcataagatttttttaggagttgtcagttcttattagttttttgtaattcccatgttttctttggcccaacaagaaacagaacaactgacatgataccatgttttctgcagaacattaatcttttatcagtggtattatcattagtgccaaaatgtttataactgtatgccatgtctaccctactaaggcctaagactgtgtccaacactgttttgcactgttcacagagtggagccaaatgtgttcgcttgactttaatccgtaccggcttctattgtttctacagtatttttgtctgtatagattgcagctacagcagtccaaacagttggctttaatctgcagtagctacagacccttttggacttgcgcactgctcatgcgaaaagtggatgcgttactgttcatgtcgggtcctgggtttgttaagacagatattagattagatcgggttgacttgttggctatttctttaactctagaaaatagttaaggatcaaatctacacatctctattgggattgtatctactttgaattaagtaagaaatagatagttcaacagttcctatctggctatctacctccttaacactggctttctcgcatggccaacatgaagtatgcctgtgacaccgtatctttctgccatattggttgagaaatcaaaccattacttaaattatcaacttcagttcagttcatagaacacataatttcactcatttttttaatttctgtttgttttgttggtacaatgcagtcagtaggcaatcgggttggagtaattgaacccttcttgatgcacatggctcatggggcgtcgataccttttcgtgcaaggcctcagagaaacaccgggttaagtaacaagtctgcacaagctgctggaaatactcttgttagtgagcacacaatcagagtgtctaagcgcttttatgtggctttaatgttatcgaggcttgctcaggtataatctaagaactacttagacattgcatgttagttctatgtcaatgcatagtgctcaagatcgctagaaagcctaagtcgtgaaatgtaaaaaatagttcaatagagattagataatgaaggttgaaatgttctctcattatatatggctaattaaaatattagctcatgtcttatatttttgtagaatacacaagagagctatgtatcatttcattgagaagggtataaataaataagttacaacacacccaccacactcacacatatacacatacaaacttgtactggaaacaattcacaacacacccaacatgccttttgcatcagaacaagacccttgggtgggcatttggggaactaaaaatttgtgggtactagaaattgctacccaatttcgagtttcgacctcgaaaaagcattagccaaaattttagatacttgataatttgagttccagttttacttggtgtacctgataattccagtagcattttaaagtaagaaacaaaagtccatcaaatcatttcatatcaattaacaagaaatcaattatcaagatagtacaaatctacattgagccataccaaataatagatttacactatactgaaccactccatatcttcatattagaaaatagaagaacaaaatttttgagatattttgcgtaattcgggtataaatttacccaaactacctgaatggaattcagttttctatagctactattacgaagatggtttccatggtgacctgctagatgggctatatgggcgactcagtttgtgggaatcttatccaaggtatcaaaggtgggacgacaaccactcgaccagccgtgtttccacctgtgaattccttcacgatatgcctgccatctatggctatggcctcgcgccacctcccttttatcaaaccacgcgagcaacgtccctcccatcgggttttcaatgtttatactcgtttgtcaaaaaggaaaatgctctcttgctcagtttcttggcaacatggactttcaagaaaattttcagacacctttttggctctttctatggaagccaccgaagaatacctcaagttctatgatacaattatttcagttcaaaacaacatgcaaggcaaggataaatggatctattcttggggaaacaacaatctacgttcaagcaagatttacatattaaacttacaatccatgtacccaccttctcctttcaagtggatctagaaatccaaagtgagtaaaaagatcaaggtgctcatttggctgaccttcagagacagaatcaactcaagaaattttcttcgaagaaagatgtgtacaattacaaatgatgattacaaccatgttctttgtggccttaattgtgaggaaaccacatatcatcttttatttgaatgtccattcagtacattgtgctggaatcatgttggtattcactgggatcaccctttggatttttttgaaatgaccatatctgcgagggatcaattcagtaaaaatttcttcatggaaattctggctgttacgacctgggagattttggaagcaaagaaatgctgctatcttcatagattcctttccatcttttacgtcttggaggttttgcttcaatgacacgttggggctacaaatgcatagaatgaactcgaatcttagcttgtcgatttccttgtggcttgcttctttattttctttacttctatctccatttgcttctattcttccttccctttactgtacatttccttttttatttaatatataccactgtatgggccttccctacagtttcatcggtcaaaaaatgtccctccaatgccctccctactgccacagtctaccatgccacaggttgttgcagcactaccatgcgctcccaccatatcttgcccaatttcatgtgtatttacaagaatttactggtataagttgctgagaaagtttgggttacacagtttgacccctgagccaggacatacatccttcctagactggtgggaggagtcttctgaagaagttcatgggatggttaagaaaggtctgaactcccttatcatcttgggggcctgaatgatttggaaccattgaaaccgatgtgtctttgatggactgacttctagtctttcctcgatccttgtgtagactgatgatgagagaagggcaactttggttaaagctgtgctcactgctattcccatttatcatctaattgctttgcaatgtccaaggtgggtaatcaaggcaatagacaagattcgcaggggttttctttggaaaggaagaactgacattagaggaggacattgtgtcgttgggtggtccaaggtctgtcgtcccctctctcttggtgggttgggaattcacaatttggaagtnnnnnnnnnnnnnnnnnnnnnnnnnnnnnnnnnnnnnnnnnnnnnnnnnnnnnnnnnnnnnnnnnnnnnnnnnnnnnnnnnnnnnnnnnnnnnnnnnnnnggcccccccgcgctgcaagtatttcatttggcttgcatctctcaaccgatgttggacggctgatcgactggcacgtcatggaatggatcatccagatagttgtcccttgtgtgatcagcaggatgagtcagtgcatcacttgctggtggattgtgtttttacgagggaagtttggtttacaacactaagcaggctaggtttgcaacatcttgctcccacgtctgatgctacaaggtttcaagattggtggagtgaggcagaaagacaagtgtctaagcataagaaaaaaggtttcaactctattgtaattttagtagcttggcagatttggaagcatagaaatgcgtgtgtgtttgacaatgcttccccaaacattcacgcaattttgctgtccatccatgatgaggctttattatggggtcttggaggggctgctgctcttaggcaggtttggttgtagtttgatttttggttttttaattttcgggggtgctttcttggcacctttgtactgggtcttttctagacccttttttcttatcttcttaatatatattgatgcgtggttctcccacgtgttcgagaaaaaaagatgatgagagaagaatatgggaattagctggggccaggggtctttccttcttggcaacacctcttcttgaggtctaacccccctggctctttagtgggtagtgtgagtgtttttacatggatcctttcatttatgcgtgctgttggcctctatagggaggttttttcttgtaacccaggtcttctttagaccttcctttccctaatatatttaaagcttagttcccctgcgcttcctagaaaaaaatatctcgcccaattctcatgcaccaaattcagttcccaacatcgtcttggctgattctaggatggtttgacacattatcgctggccttggtggactacattgccgctgcccatgcagtgtcgtgcttccacaagcttgaatttcattcatacgaatgattgacgtagtgtgagtagttcttccatggctaacacaccttggaggtcgacaagtcgtatcacctattcgaacatgacacgagcacactatcgtggatcgaattcaaggacctttgcaacttgtgtttttggcccccaattcgcaacaaccgcgttgacacattggctcgtcttcgattcttgaccaagatgcaagaataccaagatcatgtcatgccaacaagcgaagttgttcgctatgggatttccaaaatatatcaatcttgacatgaaattgtgggagccccaaaatcttcatataaaatcttcatataatcctatcatgatggcacacactgaacaaccatgaccctagtgtgcgttgtggcacactgaccaaccatgaccctaatgcacaatcagcactgatgctgaactccaacgaggaccactccaatgacaagcacatggacgagcaacaactctagcgttgcacctactctgtctattaacatcaatcgagttgtctaatcatcggaaacaagggttttgtcataattgtgatgagcaatacattcatggccatcactacaagtgactcttctacactgacgttgtcaactatcaggattatattaggtggctatgttgttgtcctcagtgtggccttcctgcgcatacttgcctcgtgttctagcggtaccagtgccacgtcttatgaaggggcattaggtctacatgcgcaagaagtctagctatggttaacgactccgtcaacaccacaaactctaggttcatggaccatctcctcaacatataagttgatctttttgctgaaacaagaggactttatcggcttggcgctgccaccactgcatgcacctgctactaaggacaactctagtagatgtcaatccatacatatacccacaactctagaagaataagctccatgctcgagaacaacatccaactgagtacattagcattgttgggccttgatgcttctcatcaagaaggttggcaactcatggaggttctgctttgactacagtgtgttgaattggaagacagtgaaggataaattttcgatcctgatggtcagtgagctactcgatgagccacccaaaattctttatctagctcgacctttggtcaggctaccaccaagtccacatctaccctgacaatgcgaaatgatgtttcttacacatcatggccacttcaagtttcttgtgataccgatgagcatcgccatcgcactagccacattcaacaacctcatgagcgacatgcttcgatagttgctttgctggctcgtccttgtattttttgatgtcatcctgttatagaacatttcttggatggagcatttgcaacatgtcaaggtggtgtttgatgtgctatgtgcgaacaagttgttcatcaagtggtccaaatgccacttcggtgtgttgttcgtctcctaccttgaccatgtgatctcggtgtatggcgtggctgtggatggcgaaaaggtggaagttgtggcatcgtggccacaactgtgatccactagggaactctgttgattccaagtatcgcgggtattacaagaagtttaacaaggactttggggtcatcgtagcacctctcatgaagctcttgaatgagggtttaggtggtgccaagaagcagaagatgccatgcaggggactcaatgggctgctatcaaccgcacctatactgcagttgttggcatttgacaagctgttcacggtagactgtgatgcgtcgagttgagtgcactaaggcgccagagcattgtcattctttagtgtaggtccttcgtagctcgacatctcaaggtggtagcctacgtgtgtgatacgattggcatggtgtaggcggtacaacgttggaggcatgggcttggtgcaggcggtacaacattggagtccctacttatggggttgaagccgatatggcattggagtccctagttacggggcaccattttctgcgcttaaagttcctgctcgatcaaatacttatcaaccccaacatcaatggatcaacatgctctttgactttgatttggttgaagtgtataagtggattgcctagcttctcccatcagcttaagcttttgggttgaactggttagtgtgtccactctaacatggtatcaaagccagaggtctcgagttcgaatcctgacagagacttaatttgtgcctccacccatttatttccacgtttgcgcgtttctctttgtctgcgtttgcgcctttctctctggctacacgtgagtggggggtggtgaagtgtataagtggattgattaccttctcccattagcctaagcttttgggttgaactggttagtgcgtccactctaacatggtaacagaaccagaggtctcgagtttgaatcctggcagaggctttatttgtgtctctacccatttatttctgcgtttgctccttttccatcagcttaagttttttgcgtccactctaacatatttcatagtgaagttttgggcaagcggaacacacttgctgacaccttgtccaatctcctattgtgacattgagactgtaggcactctcaagaccctcgttctagctctataacgacatttgccacgaggtccagacacagtgagttgggcgatccttggcggatacacgatgtcctcatcctccacgacaactagatcttcctagacacatcctctagcttgttgttcacttctttggagatcgcacaagacaagtgtccataaaaacgctcaagtgcctccaagtggacttttatattgctcgaggccgcaaggtggtctgttattttgtgaaagccttttcacatgctagaggaacaaaatagaaactcttcacctgtcgggactgctctagccattgctggtgatgttgaaggtttggaagggtgactcccttgacttcatggaaggccttccaagggtgcacgagaagtgtgatcctcacagtcaccgaccatttttctaagtatgcacatttcattgccctcgttcaccacctatagattgtggcatcggttgtgaaggcgtcattcgatggtttttatggcttttctagcatccattgtaagcgaccaggaccccgtgaaaggtaacttttggctggacctcttcaagatggctggtgtgagcttcgtataagcatagctttccatctacaaactttttttttcctcgaacagcgcaggagaactgcgcgtcatttcatttaaggaagaaagtaagtacaaaggtcaagagtgacccgaaacacaaacaccaacacacacacgccatccctcaaatacaaccgtcgcgccacatcaatgaagaaggcgaccacaacctacagggctaaaaaagcaccagtaggcaccgacccaaaaacaagttcctggagtttggaagctccagccaaacaccacagccccccttccacattaacagcttttagcacttcctcaacacatggcctagaattgtcaaagacacacctgctgcggtgcttccaaatctcccaagccactaacataattagtgaattgaggcctctacgaagccccttaggaacagcagcaacagttctcttccaccaacctgggaaccgagacactagaggtggtgaatagaactattgcaatgtacttgcagtgcatcacgggagataggtcgtgcacatggctggaatgactgccatgggaagagtattgatacaatacatccttccaaatcacgctcgaagataggcgccactgcccttggtcccattcacagtgcgcaccacgcgaactcaagcagtgcagatggcgctttaggagcgtgaccggtttttggcagagctctatgaatgactggttcaagcccaatatcacgggaaacgctaatacaataagcaccatcgcaaactagagttcgagatcggctcttgggtgtggccatgaacaggttgctgaaaagtgtctctgataccaaagatgatttgtctggattgttggctttattgatacaatgacaaggaaatcatcctgaccgccctccctaggaggctctggtcataataactcacttcttgctaaacccgtaatcaacattaggtttacagataaataggcttagaggttagctgttagagaaaggtatatgctgttgcaaaagatgatgtcttgcattgagctcttagatgatttatacagagtacatggcgtaggaggtaagacaacccatggatacatatggcagtctatgaagtataatatctagactatcaaatatactctaacacatgtggcagtctactagacaatatctagactaccaaatatactctaacactaaccactcccctagaatttctcttttttcctattgttcctcctagacttccaactaagctccatgcagacaactacggaaaaactcaacaaacttgacaactaattaggcgtggctgttagccacatggtgttgtggacgctggcttgttcttcttgtggcgagtatagacttgctgataagcgtccacaacaggttgttcgtgactgctggtgtgttaactctactatgaaaatatctatgtgcagtatgaagaagctaagctatttggttcagaactgaacctgtattcagtcttagcaactctactcatcaccctcctctagttgcaacccaatagagtatttctgatatgtctttcatatcatatgcattttgtacaagcagattagattatgtccaagttgtgtattgtaatgattttaatgtaagtttgtcttgtaatatagtctttaggaattgttccttgtggtattatttattatctgtttcttcttgtcttttgtttgtttatcttttattccaagttggggtgttcccatcttgtttccttgaaaagattgtactgttctcatgtaatgcttctttcaggagattcctattgctgatgtttgtgagacatttaaggtcgccagaggtatgattcaggcactgcaggaaaatgctggcaggtttgcttcaatggtttctgcattttgtcaaaggcttggttggaatgatttagaaggccttgtttcgaaattccaaaatcgtgtctcttttggagttagggcagagattgcagaactgacatcaattccatttgtcaaggtgtgctttaattaccatgcatatatgaattatctaagtgtctctggatcttatttcagtatggtcatgtaaaatatgaaatagggttcacgtgcaagggctttgtacaagtctggtctgcgtactcctgttgccattgctgaagcatctattcctgaaattgcaaaagctctttttgaatcttctgcttggtctgggcaaggtactctttcacgtattcatggtctgattccttactactcttttttatagtacttgttttgatgaggatataaatactatagctgaaatcctgtcctgtacagtcaaggattttccttgtacttatcttgggctacctctcacaattggcaaacccacaaaggaggtcttgctgccataattgaaaaggtggcagaatttttgctgggatggaaggcttctttaatgaactgtgcaggcagattggtaatggttcgagtagtgttaactgctgctcctatttaccttttgattgccatggatctaccaaagtgggttctaaaagccatcgacaaaaggaggggtctcctctggaagggccaggaacaagctaagggaggtcactgtttggtctcttgggaaagggtgcaacagcctctggaatatggtggtcttggaattcataatctggatctgcttggctgcgcgttgcagattcgctggttgtgggctgagaaaactgatcctagtaggctttgggcaggcctccccgctcaagtccctcgcaatgcttaggccctcttcaacattgcagtggacatcattgttgggaacggtgagcaaacactcttctggacagacagatggctggatggccataccatatctgaagtggcacccagcttatttagtgctgtctcgaagcggacagccaagaggaggacggtagcccaagctctccaaaaccaaaggtgggtggatgacatcaaaggagcactcacagtccaggttatattcgagtatctaaagattgtcgcatggtggatggtctgtttttgcagcaagatgtgccggaccaattttgtgtggaaattaacacaatccgacatttacacagcatatagtgcttatttcattggcaccatcaaatttgggccatggagaagaatatggaacagttgggcacctcctcgctgtaagtttttcatttggctggtgttccataaccggtgttggacggttgatcgccttgctaagagaggcttgccccaccctgatgcgtgccagctctgtgatcaagatgatgaagacattcaccatctcttggcctgctgtgtttttgctagacaagtatgagcaagcatctttcttcagtcgggccatactgccttggcgccatatgcttcaacaatctgtttttcaaaatggtggtggacagtaatctcaactgttcctaagaaaatgcggaagggtctaaattctttgatcattttggtcgcttgggaactgtggaatcattgtaatgcttgcttgtttgagcaacataggcccaatgttcaggaagttcttagggctgttagggatgaaggtagtctctagtgcagcgctggagcaaaaaagctccaagagctaatggtcacggtgttcagtctgggggattaggagcttgttgaggttcctttccctggccgcctttcttttttctcttctgtttgggttttagcgtctccagggtgggaggcgtgatgtacagtgggtgtgggtgaggtgttcttgtatttatttttggcattcctgcctttcttctaccttaatgaaatgttgcgcagctctcttgcgttgttcgagaaaagaaaagatgcacaaattggtttctcagttacttctggatatattcagtaataagcttgcagatactttattgtttgttttaagcctactctaatgtcaatctgttgaattgactaggtgattctggtttacgacgaatgcaatttggtgtagcaaaaaaaataaaaaatggagcccgcaaaattgtcctggaggaggcagaagccgccagagtagcagcattctcagctttcaagtcacttggtgtggaagttccccagttcactgcacctccactcgcagctattgaggaatatccaactcacgataccatagaccaagctaagttaaataagctagcttctggtacccattctagagatgataaaaatatgaatacttgctctgattatgctactccaagggcttctacatacagtctaagaaaggacacaagtcctgctccttccattcaaatgaaagagaatgcaggactatctaaaaatgtgcaaatcactagacagggagcatcatcatctttgtcaacagaaattgctgatggatctagtagagatgtggctgaaaaaggtcctgtccatgcatataacttcccagggggatttgattgttttcttgatcaatggtccacagctagtaattttttctttgatgttcattttatcaagagatcgatgaaaccatctttgaacctttttgaagtttttgggttggctgtctgttgggaaaaatctcccatatactactgcaacttcccaaaagatctagtcactactggcaacaataacatcaaggaaatgtggggtaattttcagagaagatgggaaaaaatagcggacattatgaaacaaaagagtgtccaaaaaatgacatggaatttaaagatccagatccaggcacttaaatcaccttatatttcttgccaacggcttgaaaggtttcatcttgaccataaaatgctggacaaagttgaagtgcttaacaactcatatatgttgttatcaccagtctctgtctacaatggattggatatatgtctgctggcgtgggttctatggccagatgaggaaagcagagcggttccaaatcttgagaaggtatttgatatatgtcgtgttctgcaatatctttagcttttcgttgctgatgcattgtcacttcatgtacattttttatattcgtttttttctgaactttgcaaaagcaatatgagtaggaattttagttgataagagcctcaagaaccgtgtgttggatatgaaaatgcaaggaaataggattattcatatagggcatgatgagaatgctaagagactttttaggaagacttagatgtcatgtttacaactatacctatcagtaagaaacttttcataggagatctcaatgggcatgtaagtacaacaagtgtaggttttgaggtgtttcatagaggcttccccaagcttcacgtctcagacaatgtttcttgaccaagtgggtttggctatgacatgaagctaagaaacattgtctggtcatgtccactttggagcgtaccgctcgtttacgctctcgaatctgcttccttaaagatggtgataccaattccatagctatgttttctggtcgcccgaccagctagtcgaactgggggatcgaccagcgactaatctcgattagtcgtcgactaggtccgactaatcgagctctggtcgacctggtcgtcctgttcatccaggagaccaggacctatgtatatactatataatatatactattatactatatagtaaataattatataactatatagtatatatgaacttcatatactatattatgaaggatagggtaaacatgacatgaattcagcaatactgaaaagtgaaaacagcatagaaacacttctagttattaatactacaagtcccagataccagtaccacacaacacacattaatactacaagtccaaaaaaaaatctaggtcctaaacctagtcgcccagaaccggctaatcgagcgactaatcggccctaatcgtcgactagtcggacgaccagggcgaccaggtactctagtcgagtcgactgcctaatcgagctctgctaaccgactagcccgactaatcgcgactaatcgcgattagtcggacgacttgaaaacacagttccataggcatgccagtttccggaaacaaaagaactttattgggaagttggtggttgatgatcagattttcacctcgcaagatgagaaacagaagcttgatggtatcttaattgcggatgcaagaggagacttatctttcagttatatcttttggtcgaacaatgtgcttgacaagtggagtatagtggtactaatctacacgagtaagggaaatatttaaagttgtatcaattaccaagtaattaagttgatgaaccatactatgaagctatgtgagagagttatcgagcattgtttgagaggaataatgaggatctctatgaaccaatttggtttcatgtccgaaaggtcaaccatggaagttattttcttaataagacaagggatgaagcagacagggagcagaaggacctacacatggttttgttgacttggagaagacttatgacaatatactaagaaatgtcatgtgttggtttttggacaaacataaaatctcaaggaagtatgttgtagtcattaaagacatgtgttcgaacaagggatggagacacaaataacttttcgattagaatatgactacatcaagggctggctttgagcccttatctttttgccttggcgatggatgaggtcacaagagacatacaaggggataccccttggtgtatggtttttgcgcacaatgtaatgctagttgatgaaagccgagcaagagtaaatagaaaactagagttgtgatggaagactctagagtctaaaggtttagactcaatagaacttaaactagagtatatgagatatgacttcgacactactgcacatgactacatacggaaagagatcttagtttggaagtttaagtagtgcttaggaaggatatcttttagtatttagaatcaatgctatagaatgacagggtattgatgaaaatgttagccatagaatcaaagtagggtggatgaagtagtgtcaaccatatgatgttctatgtgacaagagtgtaccacagatgctaaaagacaagttttaccaaacgatgattatacctgctatgtagtatggtgtagaatgttggcctataaaaacacattttcaatagacaagaagggattgagttcgaatcatggaatggtgatacacatgataagctaggggtagcaccaattgaagaaaatcttgtctaacacctgttgagatggtttgtaccatggtttttaaagcggtaaggcgctccaaggcgttggaccaccgcctagacgcctaggcggcgcctaggcgacgcctaggcgaggtaggcgggcaaggcgcctaggcgtcagaccaccgcccggacgcctaggcgtcgcctaggcgacgcctaggcgacgccttaaaaacagtggtttgtacatgtccaacagagaactccattagcaccattgtgtagtgacgcgctaataatgggaagagagatggagaaaggctaaagttaatatggaaagaggcattaaaaggagtcaaagatttagtcttgaataagagtgcatggaaaatagctatccatgtgcctgaaacttgacttatggtttatgttgggtttcaacgctagcctatcctaacttgtttgggattaaaaggatttgttgtttcttgaatacgcaggaggtctgcgtatttttatattaagaagaaaaaaggggggggggaccccaaaacagaaacaacagttttacaaactcacaccaccattaacgcctaagacaactcctctaaaaggatttgttgttgtttgcaatagcaatacacagctgttaattttgatgctgacctatttctgataatatattacttttgcattttactttgtgataaacagtttgtcaagaggcgacttcatagtcaagaagccgctgctgcaaatcgcgatggaagatggagaaatcagatgcacaaagcagcacacaatggctgctgtagacgtgctgcacagacacgggctttgtatactgttctgaagaaattacttactcaaaatctttctgttttggttgaaacaatcgaggccccattggtacaacacctattcttacttaatactctctccagttataacaaaagtgtcattttgggttgcctgcagttaatttgtttatactttgatgctttggattgaatatctgaaaataacgcaactagattcttcctggaaagtagttcaaaatataacaactttgttatagtttcatacattttgtagcaatcgaatcatcctattagtacccatgttggtatccaaaattacacttgtgatcggaatacaatattgctgcttgtattatgcttggatatctcttatgcatttattttgacaggttaatgttcttgctgatatggagctttggggaattggcgctgacatggatgcttgtctccgtgcgaggcatattataacaaaaaagctgaaggaactagagaaagaagcttacagattggcaggcaagaatttctctctaaatgctactgctgatatcgcagacattctatatacacacctaaaattgccagttccaaaaggctgtgagaaagggaagctgcatcctagcactgacaagcagtctttggaccacctaaggtattttttcattttccttgttagttctgacatcaaacatgttatttctagttctttggaagtacttgtgtgccactttatgtccgtgcattatggatggaaaattttaaatgtgttagcatatctagtgtctagtcactgatggtctattggtagttttgtgtgagtaaaggtaaattattatgttgtcttgatcagagctagaaaagtgcttgtggaccaccggccacatgttattggcagttaatctctggacatgcttttagaatatcattgtgctaatatgcactctttttctgttttttttggagtcaattaacaggattaactcatttttcatccctaattaaatacacgcatgcatgttcaaataatatcttcaatttggaaaagcttatgccaaagagaagcacatgtatcactgctttactgtattttcagtatataggctgctgctgatgtccttattgtatgcactcggaagatcggtagcaaggcaacactacaacagccttgccaagctggtcttcctttcgtttgaaatctatggcactcttttgatttcacttggccccaaattttcctcgacataaaattgccgtggctttatagtttactataaaatccttatcaactggacataatgctctctttaggcttctattaattatcccagtaatgtaggagaatttaatttgaccattttgctaaaatatttttgaattcttctgtttcctcagggatcaacaccccattatcccattaattaaggaacacagaacattagcaaaactgttaaatggcacgttgtggtccatttgttcacgtgctcaattgtgcactcaatcacaaaggtacatcatacatggaaattggcttcagacgtcaactgccactggccgtttgtccatggaggagccaaatctgcaggtcctttagttgtaataaatgctttgcatgttttgtttggatttcagttattgagaaataacctactgacttaacctgttactatgtagtgtgttgagcatgtggtggaattcgatacagggaaaagcgataaagattactcaagcatgtcagttgatgatcatcataaaatcaatgcccgtgattttttcatacctaccaaggtttttctcatttcacttttatgtatttattaagttttccctttaattaggacagttgactattttcctgtaacaacgctttatttaatatcatgatttacttattttgtaggagaactggttattcataactgctgattactcacagattgagttgcgtttaatggctcacttttctaaagatcatatgttggttgaacttctaaagaaacctgatggtgacgtttttaccatgattgcttcaagatgggctgagaaagaagaggccttgatttcttccaaagagagagaaaacactaaaagattcatatatggcatcctttatggaatgggtgcaaactcccttgcagaacaacttcagtgcagcactgaggaagctgcacagaaaattcaaagctttaggagattttttcctggtgtttcctcatggttacatgaagttgtgttatcctgtcgccaaaaagggttagtctacttggtagcaatttctgtttagtctttctttttatataatattgctcctttgatttttgatgctaacattgaatgagctctgtgaaaaatatgttagtcttaacttttgtggtatttcatatctgaacttttgagatatttcatatttgagcatgtattatcatatctttcaatgttagtatgcgagctgcttctcataataatttaaggtgaatatgcttcatgataatttgattttatttgaatgttaagtttatacagtaaatgataaggattactgtcttttggtcatgttatttatataacgactacttaagatcagagctcctttatctgttgggttgacatatgcacttgtagcccatattgctcatgagattgtatatatattgtcgtatccactactagcggtcttacgaaaccccaaggttactaaagccatggattagagtttgggataactttcaaatgcactcatgattcaattttctttttacctggtttgtgccgatcagaattaatgtctgcgcccttcttcagtttgttgtggcctaacttgtgaaacccttgctatctcacaacttccatctgttagacaatttattttcttccctagttacgaggatttcttctctgattatgtgccagcagttgtttcctccgtacgtagctgtccttgattaggtgtggacaattggttccttcctccctggctgtttccttttagcgcccagatcatctccccgattattgtttccatgaaatcaggtggagcacgttctggtagaggcctattgttctcctgctatttagttgaatataagcaacatttcgcgctattatggcatcaagagattgttacgatcccgtgagaactcgcttttggtaatacttgcttgcccacgtcgcctccccgatgttgtgccgtcatgccacctagtgaccctctgcccgttttccggtgaccaacaacataccgaggatgcagccacataggagaaggcctgctagatccttatcgttgctgccgatgaggctgtcaaggccgtcactgccgcctaggatcatggccgcacaacccaggacgctctcgcgagggaacgctaggctgctaccggtctcaagcgtgctaaggccgctgctcgtgacgctgccttccctcctctcaacgacgaccctgatgatgacgccgacgctagtgaagacttcaattatgaggccgctaccgcctccaacctccacgtggaggccgtgggcgtacagaacctccatgcccttgtgcctgtggttctggacatcctctccacccactacagtcgctgcgggatctcgtcctcctcgccctcgagcggtatgccgtcgccgaccatgtcctcttcgacgccctatttgtgccatcctatcgacgcatggacatcgtcgtcttgtcatgggtgttgtgcacgctctccctgagtttgagttcgctcgcacccccggcggcacaacacaccacacctggatcgttgttgaggagcaattcctcggtaatcgtgaagctcgcgcccttcatcttgacgccaaattctatgtctttatgcatggtgacctctctgtcggtgactactgccacaagataaatgggatggctgacgctctcggtgatctcggagtggttgttcgtggccgcatcctcattctcaacgtgctacacagcttgaacgagaaattaaaccacatgaaggtccactttcatgcactccaagctgctaccttccttcgtctgcaacgacctcatcctcgaggagattgactacaacgcatcaacaccgccaccagcagccgcccttgttgctgtgcatggcctttcggtagctctgcttcccctagcgtcccctcttctgggggcttagctgcgcccctgtcccacccacggcgccctccggtagcatctccactggtgccgacagctattagtagctaccgtcgtcgttgcgacaacggtggcgttgaaggcaaggccatggttccctagcctttgatctacaactcgtggaccgagttagtcaccatgtggcctggccccacatgtgggccacaagaccgtggtggccaaacgccgcgcgcgcccatgcctcaggccacgcaacaacagttgacaacaacatgactagttcgtggtcatgtcgtttggcttgaggaatgcgttaacatcattctagtcccccttgagaattgaatagcactcctagctgacaccatggactcatcgcactcttcatgggttgcttggcctcacgggcttctaccgcttcttcatcaacaactacgacatcatcaccacaccatgaacatccctcaagcgtgttgccttccagtgtgctgatgtggcgactacatcctttgaggccttcaaggcggccctcacctatggactggtgctgcagttgttgagcatcacggcttcgtccatcatcgattgcgattcttcgggcattggttttggcgtgctcttgcccgatcgccttgtttagtctgtggatggagccccagcctaccaaacttgccacctaagagcgcgagctcattggccttgtgaaggctgtgcggcactagaggtcgtatgtctgggaccggccagtggagatagaagattgggtccctaatgatttctcccctactagaatactgcaacagaacctttgaatcttttagtcctgaacaagttgtgcaggctagtttcgaaatgcaacaagggaccacaatatcgatgatacagctaggcatacatcaaagaagtttctaattcgttatcactcctcagatttgttgagactttattaggccggcgacgtgttcttacaaaaataacggctggcaatagcaaagagaaagctaaagcacagaggcaagcagtaaattctatttgccaggtaatatagcattctcacatagttttagatggttgattttattgattatatgattaatatgcatgtgtttccagggttctgctgctgatattattaaggtggctatggttagagttcattcaataattactaacagaactagtgcaactgattccacagatgaagttacaaggaaattttcagaacttggtggccagtgtcaccttattttgcaggtgttttaagacttgcattgcatgatacttattttcttttgacttttgctcagtttggctctaaatatggatgaatgcaactatatatttttcatttgtaggtgcatgatgagttggtattagaagttgatccgtgcatggtagcacaggctggaaggttgttacagatatgtatggaagaagcagcttcactattgggtatcagttttaatctaaacttcgatagttatcttatgttcagtctttgggagcatcttgaaaaggtctttaaaatttacctgctaaactaatagttatgccaagtgaacaaaatgaataggaagttctatttctgccgttctccaatagttaggttcttaaaactaacaacctgggcaggagggtatggggggagcacgcaaaaactgcggaggaggaggcacaaatagtagatatgacnnnnnnnnnnnnnnnnnnnnnnnnnnnnnnnnnnnnnnnnnnnnnnnnnnnnnnnnnnnnnnnnnnnnnnnnnnnnnnnnnnnnnnnnnnnnnnnnnnnnnnnnnnnnnnnnnnnnnnnnnnnnnnnnnnnnnnnnnnnnnnnnnnnnnnnnnnnnnnnnnnnnnnnnnnnnnnnnnnnnnnnnnnnnnnnnnnnnnnnnnnnnnnnnnnnnnnnnnnnnnnnnnnnnnnnnnnnnnnnnnnnnnnnnnnnnnnnnnnnnnnnnnnnnnnnnnnnnnnnnnnnnnnnnnnnnnnnnnnnnnnnnnnnnnnnnnnnnnnnnnnnnnnnnnnnnnnnnnnnnnnnnnnnnnnnnnnnnnnnnnnnnnnnnnnnnnnnnnnnnnnnnnnnnnnnnnnnnnnnnnnnnnnnnnnnnnnnnnnnnnnnnnnnnnnnnnnnnnnnnnnnnnnncccccccccccccccaaaaaaaaaccaaaaaaagggagctgttctaagaagcccatggagatgctctaaccaaggtaaaactgaattggtgtttgcttttatttcagtacctttgcgcacaaagataaaggtgggaaaaacttggggttcactagaaccattctatcctgagccttgttgatgcaaatggttaatgtcagttggatgccaatgtttcacgacatgcaaggtcctggaagaaggctgaacaatttccaatatgccccacagggaccttggtaaatcctactcttttttatagaagattcaccccctgcagagttaatctcatgaggcctgctatttgccactatcgtttcttgttctgcattgtccatgtatttaactgatgcataccttgaaccatatatgaccatatatccgtgtgtggctttgctaatcttgtattttgaatttagtttacattttcatcttcacggtctctttgaaacttcaaatgaatcaggtgattctgtctggtgttcttcggtagaaccttcattgctatgtctacagtcttctgtcattgctgaccgtatgtgaaatcaacgcaacagcgaccagctccattactgaggatttgctatggactggtgattatcattatgattccatgtggcatgcaagaagcatatatatatatatcaccaatagatgctgttaaagggtttaaggtgtatttgaaaggtcttcctagttatactgcgaatcttttagataaacccttaagaaattggagggcctagtatatggtgatttttcttttgctaggtccagcgctaaaaaaccgattatggggtttattcaaagatgaaatttcatcctgtaactacaggttcaaggtgtatttggtttgatggatatcactatggacaagcgatggttggtttttgtacaagttggatgttgataaaaatgttggtatccatgccacacaaaaaaagcctaaccagcacccatattttgtaatccttgtcaagtatgttatatggtttacttgatagctctagcgaggctatccagtacctcaccttcaccctcatatttgtaatccttgtccacataattattagtatgttatatggttatttagtaattacgatggaaatatta

SEQ ID NO: 27 - DNA, 154 bp, Artificial Sequence
  marker ma61227s04
ccatctcagttcttcccggccaagaagcggaggccctcgtcgcggaagggcgagtcgccgcgacccgggacgyagcatgagagccccggcggcgccaaggggtccctggaagggtacctcgtccgttcgccttgcaaccgtgccgtggcagcgg

SEQ ID NO: 28 - DNA, 72885 bp, Artificial Sequence
  genomic DNA of mutant pol theta (c->t at position 624)
  misc_feature (5583)..(5733): n is a, c, g, or t
  misc_feature (31155)..(31650): n is a, c, g, or t
  misc_feature (44470)..(44479): n is a, c, g, or t
  misc_feature (45143)..(45152): n is a, c, g, or t
  misc_feature (46993)..(47109): n is a, c, g, or t
  misc_feature (53299)..(53398): n is a, c, g, or t
  misc_feature (71287)..(71733): n is a, c, g, or t
gcccagcaattcaaaagaaaccgaacacccttccggaaattccctctggcaatggcgtcgggctcgtctcgcccccaaatcgaccaggtaaaaccctaacctagttcctcgcctattcacttcgtcgcctccaagcgctaattcttcctgcgttccggctccatctcagttcttcccggccaagaagcggaggccctcgtcgcggaagggcgagtcgccgcgacccgggacgcagcatgagagccccggcggcgccaaggggtccctggaagggtacctcgtccgttcgccttgcaaccgtgccgtggcagcggcatcggtggtccccgtgggctcgcccaggggcggggacccgggcgccaggcgtagcctctcggccgcaatggatgtcgacgtcggttcctcggcttcggtggctgcggcggcaggtgacggggcagactttgatctcaggaggagcacggcggatttcttgtcccattcctgcaggtgagcgcgcacagtgtgaaacataaggggagttatagtattggttccaataactgttattttgcaagttacgggtctaattttgttgttccagtgctatcctgcctttgaggggtgactgtgattacagcgagtagtgccagatgaagcagaagcggagtgcgtcccagtcattcttggttccttgtgacaacgactatgtcaagaagcagcgagttgcccattgtggtggctttgaagctctaaaggttggatcaagatacactatccatccatctttagcatcgtcatatgataagtgatttcatgagtttcaactcttagtttggttctttgcaggagttagatgataatgtagcttccatgaagcaatgcatcaatcaccatggtggctcagaggctgtggaggtttagttatgcctgaacaagtcaaacctggaaccgtttctttgttttcctcttttccttttgaacttctcattatttccttttcatcaggaatctgttgagggggaacatgtgagttgtgttgggttttcggccttgcaaagatgtagctttaccccaagtactgcacagataaaagttgggttttctctagcacctgtggaaaccctaaagtctgtatcgaggaattcccttacttcacctggtgaggagttctggaatgcagcaattgaactcgctgatgggatatctgcccaggctgataaggtccgtggaaggccagaatttgatgcagcagaagacaagtcatcttgtgcagtagcagcattctttaagactcttcctagatcaggaagggatgagcttgactgtcaaaacacagtaggcagcaatgatacacatcatatagagaaattgtcaaataaagttgaatcactggcagtaaactgtcagcatataattagctcacctttgcctgtgaagcagctagatttctttcatgaggatgatattaaagtttcaggttcaaaatttgaaacaaaaggcagctatgaaacttgtaatgcacaagcagaccgtgttccactgaaaggcagtggccgcctagaaaaggaaaatctcatggaccctgtggatgtgatgaagagaagtgctattaatttgcacactgattctgcagccatgagatgtcagggtgttttcaagtcaacaactgaagggaaggttcatccaactcaagaggctggaagagattctaatcttattaggagagatctcaatcagccaacccacaatgaaaataaatcacttgctgcatattcaaataatcgcaagacttggatagattccaagagtaaagttgcttctcaggaagtggaagctagcacacctactagctccattcctctaaaggatcactcaaagatatcaagttggcttcctcctgacctttgtgctatatacatgaaaaaaggcatttcagagctgtacccttggcaggttaaggttcttttctctaattatctatttaatgaatctctggcagctagccttctttcgtctggccatttttgcctatgtatttttttctccagccatgcaaactaccactgccctctctactagtaggattaccaattatttttgctcgtaagctaagcttctttagtatttgtatcgtaataagtatgtcttgaaaactagtacttagtatatcaagtgctgagatggtttgtacatgtccaatagagaccttttagaggcaccagtgcatattagtattataaaacattaaaacgtgatagtaatgggaagaggtagggaaaggccaaacttgatatggaaagatgcaataaaaggagacttaaaatgatgaaatatatctaaagatttagtcttcaatatgattatgagtgcatggaaaacaactattcacgtgcctaaccttgatttgtggcttgtgttgggtttcaactctagtctacactcacttgcttggtactaaaaggctttgttgttattgttgattcatataaaatgctaagtcttctcttgtattgctgtcatcacattcttttcacgtttttaatgcgtttttgcttcatttttctcgaatattgtaatgctctcctagatctgtctgaaggcatgtttggtttgtgcccccactatgctaaaccaaatttggcaatagaagaaaccatgacatggccttttgtaacaccccgtccaatccctggaccggcggtacttactcctggtagctctctagaatcatatattgtccccacagaccaacacaagtcttttatgcgcactttgtcctcactcatgcgcacccgagaaaacttcccagtcggtcacccatcccaaattgctccaagccaagcacgcttaacttggaggttcttttgagataggcttcctaaaaagaagatgcaccttgttgatatggttactctattaattctattaagccttgggccaggatatcccatcccaggggccaggatatcacaattcaccccccttagaagaccgatgtcctcgtcggtcaaccccaatccaggaacctcccctcttagccacgtctgtgtgtctagtgtcgtcatatgccatgccatgtgaccactctgggcccacatgcgccatgcgccatatacccaaaccacctagcccacacacgcccgtgaaacatcgagggtcggctctgataccacttgtaacaccccgtccaatccttagaccggcggtacttactcctggtagctctctagaatcatatattgtccccacagaccaacacaagtcttttatgcgcactttgtcctcactcatgcgcacccgagaaaacttcccagtcggtcacccatcccaaattgctccaagccaaacacgcttaacttggaggttctttcgagatagacttcctaaaaagaagatacaccttgttgatatggttactctattaattctattaagccttgggccaggatatcccatcccaggggccaggatatcacacctttaggcaggtacaagatttgaattggattattggagccaaataaatttacataaatatctacctaactaaaaggaacaatgtttcttgttgccccttccacccaatgataggtggacccaaggtaatcctgcgtctcttatgtcaggtcagcactctctcgctaagagccatttgttcatgattgaatagccaagtgagatggccaccatcctcgaggtcatgttttcggacctaggatgtcaggccgaatgtgttctggttcttggagttgtattttgtttcttttaatataagccgttcggttgcataggccaaaagagcagtttgaggccaaatgaaattttagcggcgagagctgtctcactgagttgtgagtttgaagcagtctttccgcatttgcgcggggggggggtgatggaataagtcttgagcatctagaggacagcctgcttttgactgtcctctgtagtcctttagcatctagaggacaacagtcgctttttgactgtcctctgtagtctctttagcatctagaggacaacaatcgcttttgactgtcctctgtagtcgctttagcatctagaggacagcagtcgctttttgactgtcctctgtagtctctttagcatctagaggacaatcctgttgtgtagtgtgtgtgagaaggtgtggtagtgcagcccctagggctataaatatgtgtccccaacctctctaagggtatgacattgtgtagtgtttgaggaaataaacagaaaattgccccaactcatagtgtcatcctcttgatgagagttagagtccctctacttacaattggtatcagagccaaactatcctgcagcctaaacatatcgtgctcatctccttctcgcgtctctccccacactcagtcggcagcaagagctccaactgttccttcctcccctgctcagacgagcagcctttcgtctgagacagcctcttccacacgcagcaacccctcactagcccaccatgtccctacgctcggccacttcgagtgcgcggcgccagcaggaggccgaggtcgccgcggcacaagaacgcgagcgagcagcagcagcggctgcagcgacagcggcgagggcagcacggttggcggcggcggaactggcagcggcgagagcggaagtagaagcagcggaggcggcggatgctgcacgtgcggcggcaacagagctcgaggttctgcgcggcagtagagctggcagctctgcttctgtcgacgacaacaccgacgaagagctcaggctggcgagggaagcagcgcgagagcaggcggcatagtgggcagccgcgcatccccatgggggcgcgcgtggcggcagcccggatacgcgctgacggcgctctaggcggaggcgcacgcggcggcagcccagacgggcgtagacgcgccggcggtgctcccggcggcggcgaccgagtcgacggagatcgcggcctctacaggcggcgcggttctccctccccggatcggtaccatggtcgccgcatggcccaggccattgtcagggacatcggtcccggcggtggggggcctaccctcaccaagaccaactacgtcgagtgggccgcggtgatgagggtacggctccaggttcgccacatgtgggaagcagttcgttacgacgacgtcgactaccacgaggatcggcgggcgctggatgctctcattgctgtagtcccgcccgagatgcagttttcgctttcccagaagcggactgccaaggaggcctgggacgccatcgctgcgacccgcatcggcagcgatcgtgcccgcaagaccacactgcaggcacttcgcaaggagtgggagaacctggccttcaagccaggtgaggatgttgatgactttgctctccgcctcaacactctgttgcagaagatggtgcagttcggcgacgacacctacgatgaggagagagctgttgagaagctcttccgttgcatccccgagaagtacaggcagattgctcgctcgatcgagtctctgctagacctctccacgatgacgatcgaagaggcgattggtcgcctcaaggtggtggatggcgacgaaccacaggctctctctgggcctatcactatcggcgggnnnnnnnnnnnnnnnnnnnnnnnnnnnnnnnnnnnnnnnnnnnnnnnnnnnnnnnnnnnnnnnnnnnnnnnnnnnnnnnnnnnnnnnnnnnnnnnnnnnnnnnnnnnnnnnnnnnnnnnnnnnnnnnnnnnnnnnnnnnnnnnnnnnnnnncagggtgacaagaagaagggggagtcctcctcctcgacacgaggccgcaaacgcggcaagccgcgcaagccgcgtggaggcgcccaggccggggcgcgaggacatgctgagggtggtgcacgtggaggtgcccaaggcggcgccgtcggcaacaagaagccggcacgcgacgacggctgccacaactgcggcaagcttggccactgggccagggattgtcggcagccacgacgtggccaggccaacgtcgcacaagcagaggcggaggaggaggccctgctcctggcacatgcaagcatcgagccatctccagcggcaccggccgcagcggcactcctccaccttgatgagtcgaaagcacgcgctttcctcggcgacggctccaacaaggacatgatcgaaggatggtgcctcgacaccggcgccactcatcacatgaccggccgacgggagttcttcaccgagcttgactctagcgtccgaggctccgtcaagtttggggacgcctccggtgtagagatcaagggcgccggctcagtcgtcttcaccgccacgtctggtgagcacaggctgctcaccggagtctactacatccccgcgttgagaaactctatcatcagtttgggacagctggatgagaacggttcgcgcgtggaggtcgagcacggagtcatgaggatctgggatccctctcgtcgccttcttgccaaggtacgcaggagtgcaaatcggctttacatcctcaatgtgaaggtggcacaaccttgctgccttgctgctcgtcgagacgacggggcatggcagtggcacgagcgcttcgggcaccttaacttcgaagccttgaagcggctcagcgccaaggagatggtacgaggcctgccgtgccttgaccatgtggagcaattctgcgatgtctgcgtgttgacaaagtagagactgctccccttcccccagcagtcgagcttccgagccaaggagaggctcgagctcgtgcatggggacttgtgtggcccggtgacaccagccacaccaggaggacgacgctacttcttgctgctcgtcgacgatctctcccgctacatgtgggtgatgatccttggcagaaagggagaggctgcgaacgccatcaggcgtgtgcaggtcgctgcggaggcggagtgcggccgcaagctgtgatggaataagtcttgagcatctagaggacagcctgcttttgactgtcctctgtagtcctttagcatctagaggacagcttgactgtcctctgtagtctctttagcatctagaggacagcagtcgctttttgactgtcctctgtagtcgctttagcatctagaggacagcagtcgcttttgactgtcctctgtagtctctttagcatctagaggacaatcctgttgtatagtgtgtgtgagaaggtgtggtagtgcagcccctagggctataaatatgtgtccccaacccctctaagggtatggcattgtgtagtgtttgaggaaataaacagaaaattgccccaactcatagtgtcatcctcttgatgagagttagagtccctctacttacaattggtatcagagccaaactatcctgcagcctaaacatctcgtgttcatctccttcccgcgcctctccccacactcagtcggcagcaagagctccaactgttcctccctcccctgctcagacgagcagcctttcgtctgagacagcctcttccacacgcagcgacccctcactagcccgccatgtccctacgctcggccacttcgagtgcgcggcgccagcaggaggccgaggtcgccgcggcacaagaacgcgagcgagcagcagcagcggctgcagcgacagcgacgagggcagcacggttggcggcggcggaactggcagcggcgagagcggaagtagaagcagcggaggcggcggatgctgcacgtgcggcggcaacagagctcgaggttctgcgcggcagtagagctggcagctctgcttctgtcgacgacaacaccgacgacgagctcaggctggcgagggaagcagcgcgagagcaggcggcacagtgggcagccgcgcatccccatgggggcgcgcgtggcggcagcccggataggcgccgacacgctgacggcgctccaggcgggggcgcacgcggcggcagcccagacgggcgtagacgcgccgacggtgctcccggcggcggcgaccgagtcgacggagatcgcggcctctacaggcggcgcggttctccctccccggatcggtaccatggtcgtcgcatggcccaagccattgtcagggacatcggtcccgacggtgggtggcctaccctcaccaagaccaactacgtcgagtgggccgcggtgatgagggtacggctccaggttcgccacatgtgggaagcagttcgttacgacgacgtcgactaccacgaggatcggcgggcgctggatgctctcattgctgcagtcccgcccgagatgcagttttcgctttcccagaagcggactgccaaggaggcctgggacgccatcgctgcgacccgcatcggcagcgatcgtgcccgcaagaccacactgcaggcacttcgcaaggagtgggagaacctggctttcatgccaggtgaggatgttgatgactttgctctccgcctcaacactctgttgcagaagatggtgcagttcggcgacgacacctacgatgaggagagagctgttgagaagctcttccgttgcatccccgagaagtacaggcagattgctcgctcgatcgagtctctgctagacctctccacgatgacgatcgaagaggcgattggtcgcctcaaggtggtcgacggcgacgaaccacaggctctctctgggcctatcactatcggcgggaagctacatctcactcgggagcagtgggaggcctgccagggtgacaagaaggagtcctcctcgacacgaggccgcaaacgcggcaagccgcgcaaggcgcgtggaggcgcccaggccggggcgcgaggacatgctgagggtggtgcacgtggaggtgcccaaggcggcgccgtcggcaacaagaagccgacacgagacgacggctgccacaactgcggcaagcttggccactgggccagggattgtcggcagccacgacgtggccaggccaacgacgcacaggcggaggcggaggaggaggccctgctcctggcacatgcaagcatcgagccatctccagcggcaccggccgcagcggcactcctccaccttgatgagtcgaaagcacgcgctttcctcggcgacggctccaacaaggacatgatcgaaggatggtgcctcgacaccggcgccactcatcacatgaccggccgacgggagttcttcaccgagcttgactctagcgtccgaggctccgtcaagtttggggacgcctccggtgtagagatcaagggcgccggctcagtcgtcttcaccgccacgtctggtgagcacaggctgctcaccggagtctactacatccccgcgttgagaaactctatcatcagtttgggacagctggatgagaacggttcgcgcgtggaggtcgagcacggagtcatgaggatctgggatccctctcgtcgccttcttgccaaggtacgcaggagtgcaaatcggctttacatcctcaatgtgaaggtggcacaaccttgctgccttgctgctcgtcgagacgacggggcatggcagtggcacgagcgcttcgggcaccttaacttcgaagccttgaagcggctcagcgccaaggagatggtacgaggcctgccgtgccttgaccatgtggagcaattctgcgatgtctgcgtgttgacaaagtagagactgctccccttcccccagcagtcgagcttccgagccaaggagaggctcgagctcgtgcatggggacttgtgtggcccggtgacaccagccacaccaggaggacgacgctacttcttgctgctcgtcgacgatctctcccgctacatgtgggtgatgatccttggcagaaagggagaggctgcgaacgccatcaggcgtgtgcaggtcgctgcggaggcggagtgcggccgcaagctgtgatggaataagtcttgagcatctagaggacagcctgcttttgactgtcctctgtagtcctttagcatctagaggacagcttgactgtcctctgtagtctctttagcatctagaggacagcagtcgctttttgactgtcctctgtagtcgctttagcatctagaggacagcagtcgcttttgactgtcctctgtagtctctttagcatctagaggacaatcctgttgtatagtgtgtgtgagaaggtgtggtagtgcagcccctagggctataaatatgtgtccccaacccctctaagggtatggcattgtgtagtgtttgaggaaataaacagaaaattgccccaactcatagtgtcatcctcttgatgagagttagagtccctctacttacaattggtatcagagccaaactatcctgcagcctaaacatctcgtgttcatctccttcccgcgcctctccccacactcagtcggcagcaagagctccaactgttcctccctcccctgctcagacgagcagcctttcgtctgagacagcctcttccacacgcagcgacccctcactagcccgccatgtccctacgctcggccacttcgagtgcgcggcgccagcaggaggccgaggtcgccgcggcacaagaacgcgagcgagcagcagcagcggctgcagcgacagcgacgagggcagcacggttggcggcggcggaactggcagcggcgagagcggaagtagaagcagcggaggcggcggatgctgcacgtgcggcggcaacagagcttgaggttctgcgcggcagtagagctggcagctctgcttctgtcgacgacaacaccgacgaagagctcaggctggcgagggaagcagcgcgagagcaggcggcacagtgggcagtcgcgcatccccatgggggcgcgcgtggcggcagcccggataggcgtcgacacgctgacggcgctccaggcgggggcgcacgcggcggcagcccagacgggcgtagacgcgccggcggtgctcccggcggcggcgaccgagttgacggagatcgcggcctctacaggcggcgcggttctccctccccggatcggtaccatggtcgtcgcatggcccaagccattgtcagggacatcggtcccggcggtgggtggcctaccctcaccaagaccaactacgtcgagtgggccgtggtgatgagggtacggctccaggttcgccacatgtgggaagcagttcgttacgacgacgtcgactaccacgaggatcggcgggcgctggatgcccccattgctgcagtcccgcccgagatgcagttttcgctttcccagaagcggactgccaaggaggcctgggacgccatcgctgcgacccgcatcggcagcgatcgtgcccgcaagaccacactgcaggcacttcgcaaggagtgggagaacatgaccttcaagccaggtgaggatgttgatgactttgctctccgcctcaacactctgttgcagaagatggtgcagttcggcgacgacacctacgatgaggagagagctgttgagaagctcttccgttgcatccccgagaagtacaggcagattgctcgctcgatcgagtctctgctagacctctccacgatgacgatcgaagaggcgattggtcgcctcaaggtggtcgacggcgacgaaccacaggctctctctgggcctatccctatcggcgggaagctacatctcactcgggagcagtgggaggcctgccagggtgacaagaagcagggggagtcctcctcgacacgaggccgcaaacgcggcaagccgcgcaaggcgcgtggaggcgcccaggccggggcgcgaggacatgctgagggtggtgcacgtggaggtgcccaaggcggcgccgtcggcaacaagaagccggcacgagacgacggctgccacaactgcggcaagcttggccactgggccagggattgtcggcagctacgacgtggccaggccaacgtcgcacaggcggaggcggaggaggaggccctgctcctggcacatgcaagcatcgagccatctccagcggcaccggccgcagcggcactcctccaccttgatgagtcgaaagcacgcgctttcctcggcgacggctccaacaaggacatgatcgaaggatggtgcctcgacaccggcgccactcatcacatgaccggccgacgggagttcttcaccgagcttgactctagcgtccgaggctccgtcaagtttggggacgcctccggtgtagagatcaagggcgccggctcagtcgtcttcaccgccacgtctggtgagcacaggctgctcaccggagtctactacatccccgcgttgagaaactctatcatcagtttgggacagctggatgagaacggttcgcgcgtggaggtcgagcacggagtcatgaggatctgggatccctctcgtcgccttcttgccaaggtacgcaggagtgcaaatcggctttacatcctcaatgtgaaggtggcacaaccttgctgccttgctgctcgtcgagacgacggggcatggcagtggcacgagcgcttcgggcaccttaacttcgaagccttgaagcggctcagcgccaaggagatggtacgaggcctgccgtgccttgaccatgtggagcaattctgcgatgtctgcgtgttgacaaagtagagactgctccccttcccccagcagtcgagcttccgagccaaggagaggctcgagctcgtgcatggggacttgtgtggcccggtgacaccagccacaccaggaggacgacgctacttcttgctgctcgtcgacgatctctcccgctacatgtgggtgatgatccttggcagaaagggagaggctgcgaacgccatcaggcgtgtgcaggtcgctgcggaggcggagtgcggccgcaagctgtgatggaataagtcttgagcatctagaggacagcctgcttttgactgtcctctgtagtcctttagcatctagaggacagcttgactgtcctctgtagtctctttagcatctagaggacaacagtcgctttttgactgtcctctgtagtcgctttagcatctagaggacagcagtcgcttttgactgtcctctgtagtctctttagcatctagaggacaatcctgttgtatagtgtgtgtgagaaggtgtggtagtgcagcccctagggctataaatatgtgtccccaacccctctaagggtatggcattgtgtagtgtttgaagaaataaacagaaaattgccccaactcatagtgtcatcctctgatgagagttagagtccctctacttacaattggtatcagagccaaactatcctgcagcctaaacatctcgtgctcatctccttcccgtgcctctccccacactcagtcggtagcaagagctccaactgttccttcctcccctgctcaaacgagcagcctttcgtctgagacagcctcttccacacgcagcgacccctcactagcccaccatgtccctacgctcggccacttcgagtgcgcggcgccagcaggaggccgaggtcgccgcggcacaagaacgcgagcgagcagcagcagcggctgcagcgacagcggcgagggcagcacggttggcggcggcggaactggcagcggcgagagcggaagtagaagcagcggaggcggcggatgctgcacgtgcggcggcaacagagctcgaggttctgcgcggcagtagagctggcagctctgcttctgtcgacgacaacaccgacgacgagctcaggctggcgagggaagcagcgcgagagcaggcggcacagtgggcagccgcgcatccccatgggggcgcgcgtggcggcagcccggataggcgccgacacgctgacggcgctccaggcgggggcgcacgcggcggcagcccagacgggcgtagacgcgccggcggtgctctcggcggcggcgaccgagtcgacggagatcgcggcctctacaggcggcgcggttctccctccccggatcggtaccatggtcgtcgcatggcccaagccattgtcagggacatcggtcccgacggtgggtggcctaccctcaccaagaccaactacgtcgagtgggccgcggtgatgagggtacggctccaggttcgccacatgtgggaagcagttcgttacgacgacgtcgactaccacgaggatcggcgggcgctggatgctctcattgctgcagtcccgcccgagatgcagttttcgctttcccagaagcggactgccaagaaggcctgggacgccatcgctgcgacccgcatcggcagcgatcgtgcccgcaagaccacactgcagacacttcgcaaggagtgggagaacctggccttcaagccaggtgaggatgttgatgactttgctctctgcctcaacactctgttgcagaagatggtgcagttcggtgacgacacctacgatgaggagagagctgttgagaagctcttccgttgcatccccgagaagtacaggcagattgctcgctcgatcgagtctctgctagacctctccacgatgacgatcgaagaggcgattggtcgcctcaagggggtcgacggcgacgaaccacaggctctctctgggcctatcactatcggcgggaagctacatctcactcgggagcagtgggaggcctgccagggtgacaagaagcagggggagtcctcctcgacacgaggccgcaaacacggcaagccgcgcaaggcgcgtggaggcgcccaagccggggcgcgaggacatgctgagggtggtgcacgtggaggtgcccaaggcggcgccgtcggcaacaagaagccggcacgagacgacggctgccacaactgcggcaagcttggccactgggccagggattgtcggcagccacgacgtggccaggccaacgtcgcacaggcggaggcggaggaggaggccctgctcctggcacatgcaagcatcgagccatctccagcggcaccggccgcagcggcactcctccaccttgacgagtcgaaagcacgcgctttcctcggcgacggctccaacaaggacatgatcgaaggatggtgcctcgacaccggcgccactcatcacatgaccggccgacgagagttcttcaccgagcttgactctagcgtccgaggctccgtcaagtttggggacgcctccggcgtagagatcaagggcgccggctcagtcgtcttcaccgccgcgtctggtgagcacaggctgctcaccggagtctactacatccccgcgttgaggaactctatcatcagcttgggacagctggatgagaacggttcgcgcgtggaggtcgagcacggagtaatgaggatctgggatccctctcgtcgccttcttgccaaggtacgcaggagtgcaaatcggctttacatcctcaatgtgaaggtggcacaaccttgctgccttgctgctcgtcgagacgacggggcatggcagtggcacgagcgcttcgggcaccttaacttcgaagccctgaagcggctcagcgccaaggagatggtacgaggcctgccgtgccttgaccatgtggagcaattctgcgatgtctgcgtgttgacaaagcagagacgactccccttcccccagcagtcgagcttccgagccaaggagaggctcgagctcgtgcatggggacttgtgtggcccggtgaccccagccacaccaggaggacgacgctacttcttgctgctcgtcgacgatctctcccgctacatgtgggtgatgatccttggcagaaagggagaggctgcgaacgccatcaggcgtgtgcaggtcgctgcggaggcggagtgcggccgcaagctgtgatggaataagtcttgagcatctagaggacagcctgcttttgactgtcctctgtagtcctttagcatctagaggacagcttgactgtcctctgtagtctctttagcatctagaggacaatcctgttgtgtagtgtgtgtgagaaggtgtggtagtgcagcccctagggctataaatatgtgtccccaacccctctaagggtaatggcattgtgtagagtttgaggaaataaacagaaaattgccccaactcatagtgtcatcctcttgatgagagttagagtccctctacttacaattggtatcagagccaaactatcctgcagcctaaacatctcttgctcatctccttcccgcgcccctccccacactcagtcggcagcaagagctccaactgttccttcctcccctgctcagacgagcagcctttcgtctgagacagcctcttccacacgcagcgacccctcactagcccacgatgtccctacgctcggccacttcgagtgcgcggcgccagcaggaggccgaggtcgccgcggcacaagaacgcgagcgagcagcagcagcggctgcagcgacagcggcgagggcagcacggttggcggcggcggaactggcagcggcgagagcggaagtagaagcagcggaggcggcggatgctgcacgtgcggcggcaacagagctcgaggttctgcgcggcagtagagctggcagctctgcttctgtcgacgacaacaccgacgacgagctcaggctggcgagggaagcagcgcgagagcaggcggcacagtgggcagccgcacatccccatgggggcgcgcgtggcggcagcccggataggcgccgacacgctgacggcgctccaggcgggggcgcacgcggcggcagcccagacgggcgtagacgcgccggcggtgctcccggcggcggcgaccgagtcgacggagatcgcggcctctacaggcggcgcggttctccctccccggatcggtaccatggtcgtcgcatggcccaagccattgtcagggacatcggtcccggcggtgggtggcctaccctcaccaagaccaactacgtcgagtgggccgcggtgatgagggtacggctccaggttcgccacatgtgggaagcagttcgttacgacgacgtcgactcccacgaggatcggcgggcgctggatgctctcattgctgcagtcccgcccgagatgcagttttcgctttcccagaagcggacagccaaggaggcctgggacgccatcgctgcgacccgcatcggcagcgatcgtgcccgcaagaccacactgcaggcacttcgcaaggagtgggagaacctggccttcaagccaggtgaggatgttgatgactttgctctccgcctcaacactctgttgcagaagatggtgcagttcggcgacgacacctacgatgaggagagagctgttgagaagctcttccgttgcatccccgagaagtacaggcagattgctcgctcgatcgagtctctgctagacctctccacgatgacgatcgaagagtcgattggtcacctcaaggtggtcgacggcgacgaaccacaggctctctctgggcctatcactatcggcgggaagctacatctcactcgggagcagtgggaggcctgccagggtgacaagaagaagggggagtcctcctcgacacgaggccgcaaacgcggcaagccgcgcaaggcgcgtggaggcgcccaggccggcgcgcgaggacatgctgagggtggtgcacgtggaggtgcccaaggcggcgccgtcggcaacaagaagccggcacgagacgacggctgccacaactgcggcaagcttggccactgggccagggattgtcggcagccacgacgtggccaggccaatgtcgcacaggcggaggcggaggaggaggccctgctcctggcacatgcaagcatcgagccatctccagcggcaccggccgcagcggcactcctccaccttgatgagtcgaaagcacgcgctttcctcggcgacggctccaacaaggacatgatcgaaggatggtgcctcgacaccggcgccactcatcacatgaccggccgacgggagttcttcaccgagcttgactctagcgtccgaggctccgtcaagtttggggacgcctccggcgtagagatcaagggcgctggctcagtcgtcttcaccgccgcgtctggtgagcacaggctgctcaccggagtctactacatccccgcgttgaggaactctatcatcagcttgggacagctggatgagaacggttcacgcgtggaggtcgagcacggagtcatgaggatttgggatccctctcgtcgccttcttgccaaggtacgcaggagtctaaatcggctatacatcctcaatgtgaaggtggcacaaccttgttgtcttgctgctcgtcgagacgatggggcatggcagtggcacgagcgctttgggcaccttaacttcgaggccctgaagcggctcagtgccaaggagatggtacgaggcctgccgtgccttgaccatgtggagcaattctgcgatgtctgcgtgttgacaaagcagagatggctcccctttccccagcagtcgagcttccgagccaaggagaggcttgagctcgtgcatggggacttgtgtggcccggtgacaccagccacaccaggaggacgacgctacttcttgctgctcgtcgacgatctctcccgctacatgtgggtgatgatccttggcagcaagggagaggctgcgaacgccatcaggcgtgtgcaggtcactgcggaggcggagtgcggccgcaagctgcgcgtgctgcgcaccaacaacggcggcgaattcacgacggctgagttcgcgtcgtactgcgcggatgagggcgttcagcgccactactccgcgccgtacagcccgcagcagaacggcgtcgtcgagcggcgcaaccagacggttgtggggatggctcgggctctcctcaagcagagaggaatgccagctgtcttctggggagaggcggtggtgacagcgggttacatcctcaaccgctcgcccaccaaggctctcaacgggatgacaccgtacgaggcttggcatgggcgcaagccggcggtctctcacctacgggtcttcggctgcctcgcgttcaccaaggagcttggccacatcagcaagctcgacgataggagcaccccgggggtgttcattggctacgcggagggctcgaaggcctaccgcatctttgacccaagaacacagcgtgtgcgcacggcgcgcgacgtagtgttcgacgaagggcgaggttgggcgtgggacaaggcggtggacgacggcacgactccgacgtacgacttcaccatcgagtacgtccactttgagggagctgggggagtaggcaactcttctccgagcaggtctaccccagcccccaagtctccaccgcctccagcgccactctctccagctcctgctacaacgagctcttcaccaccacgcactccagccacgactccggctacagcgagctcttcgccaccacgtactccagcaccgacggtaccctctccgggaacgtcctctccgacaccagctcgtgtcgagcacgacccagtggagctcgtgacccctctgtcccgcgacgaggagcgcgtcgacgcgtgctacgccggcgagccgttgcggtatcgaagggtggagggccttctcatcgacccgtcggtgccaggccctgcatctcgcattctggcaggagagttgcatcttgcatgcgacgatggtgagcctcggtctttcgcggaggccgagcaacatgcggcttggcgtgccgcgatgcagtcggagatggacgcggttgagacgaaccgcacttgggagctcgctgatctccctcatggtcatcgcgcgatcacccttaagtgggtgttcaaactgaagagggatgaagccggcgccatcgtcaagcataaggctcgcttggtggcacgcggtttcttgcagcaggaggggatcgacttcgacgatgccttcgcccctgtagcacggatggaatccgtgcgactccttgcgctggcagccctggagggctggcatgttcatcacatggatgtcaagtcggcgtttcttaacggcgacttaaaggaggaggtctatgtacaccagccgccaggttttgcgatccctggcaaggagggcaaggtgttgcgcctgcgcaaggctctctacggcttgcgacaggcaccaagggcgtggaatgccaagctggattccacgctcaagaggatgggcttcatgccaagcccgcacgaggcggccatctatcgacggggcaatggagaaaatgccctgctggtgggtgtctacgtcgacgacttggtgatcaccggcgccaaggatgcagaggtggcagcgttcaaggaagagatgaaggccaccttccaaatgagtgacctggggcatctctccttctacctggggattgaggtgcaccagggagactccgggatcacacttcgccagaccgcctacgccaagcgcattgttgagctggctgggctcatcgactgcaacccagctctcactccgatggaggagaggctgaagctgagtcgcgacagcacgacgaaggaggtggatgctacacagtaccggcgtcttgtggggagccttcgctacctcgtccacacacggcctgacttggcatactccgtcggctacgttagtcggtttctgcagcgatcgacgacggagcatgagcaggctgtgaagaggatcatccgctatgttgcggggactctcgaccacggtctctactacccgaggtgccctggggaggcacaccttgtcgggtacagcgatagcgaccacgccggcgacatcgacaccagcaagagcacaagcgggatcctcttcttcctcggcaagtgccccatcagctggcagtcggtcaagcagcaggtggtggccatgtccagctgcgaggccgagtacatagcagcgtccactgcttcgactcaggctctctggctggctcgactgctcggtgatctcctcgggagagacactggagcggtggaactcagggtggacagccagtccgctctggcattggccaagaaccccgtgttccatgaacggagcaagcacatccggctgagataccacttcatccgagactgcttggcagaagggagcatcaaggcgtgctacatcaacaccaaggatcagcttgcagacctgctcaccaagccccttgggaagatcaagtttgttgagctttgctccaggtccgggatggcccaactttctcacaagacgacgcccaagacttagggggagaatgatggaataagtcttgagcatctagaggacagcctgcttttgactgtcctctgtagtctctttagcatctagaggacagcagtcgctttttgactgtcctctgtagtcgctttagcatctagaggacagcagtcgcttttgactgtcctctgtagtctctttagcatctagaggacaatcctgttgtatagtgtgtgtgagaaggtgtggtagtgcagcccctagggctataaatatgtgtccccaacccctctaagggtatggcattgtgtagtgtttgaggaaataaacagaaaattgccccaactcatagtgtcatcctcttgatgagagttagggtccctctacttacaagctgcgcgtgctgcgcaccgacaacggcggcgaattcacggcggctgagttcgcgtcgtactgcgcggatgagggcgttcagcgccactactccgcgccgtacagcccgcagcagaacggtgtcgtcgagcggcgcaaccagacggttgtggggatggctcgagctctcctcaagcagagaggaatgccagctgtcttctggggagaggcggtggtgacagcggtttacatcctcaaccgctcgcccaccaaggctctcaacgggatgacaccgtacgagacttggcatgggcgcaagccggcggtctctcacctacgggtcttcggctgcctcgcgttcaccaaggagcttggccacatcagcaagctcgacgataggagcaccccgggggtgttcattggctacgcggagggctcgaaggcctaccgcattcttgacccaagaacacagcgtgtgcgcacggcgcgcgacgtagtgttcgacgaagggcgaggatgggcgtgggacaaggcggtggacgacggcacgactccgacgtacgacttcaccatcgagtacgtccaatttgagggagctgggggagtaggcaactcttctccgagcaggtctaccccagcccccaagtctccaccaactccagcgccacactctctagctcctgctacaacgagctcttcaccaccacgcactccagccacgactccggctacagcgagctcttcgccaccacgtactccagcaccgacggtaccctctctgggaacgtcctctccgacaccagctcgtgtcgagcacgacccagtggagctcgtgacccctctgtcccgcgacgaggagcgcgtcgacgcgtgctacgccggcgagccgttgcggtatcgaagggtggagggccttctcatcgacccgtcggtgccaggccctgcatctcgcattctggcaggagagttgcatcttgcatgcgacgatggtgagcctcggtctttcgcggaggccgagcaacatgcggcttggcgtgccgcgatgcagtcggagatggacgcggttgagacgaaccgcacttgggagctcgctgatctccctcatggtcatcgcgcgatcacccttaagtgggtgttcaaactgaagagggatgaagccggcgccatcgtcaagcataaggctcgcttggtggcacgcggtttcttgcagcaggaggggatcgacttcgacgatgccttcgcccctgtagcacggatggaatccgtgcgactcctcctcgcgttggcagccctgaagggctggcatgttcatcacatggatgtcaagtcggcgtttcttaacggcgacttaaaggaggaggtctacgtacaccagccgccaggttttgcgatccctggcaaggagggcaaggtgttgcgtctgcgcaaggctctctacggcttgcgacaggcaccaagggcgtggaatgccaagctggattccacgctcaagaggatgggcttcatgccaagcccgcacgaggcggccatctatcggcggggcaatggaggaagtgccctgctggtgggtgtctacgtcgacgacttggtgatcaccggcgccaaggatgcagaggtggcagcattcaaggaagagatgaaggccaccttccaaatgagtgacccggggcacctctccttctacctggggattgaggtgcaccagggggactccgggatcacacttcgccagaccgcctacgccaagcgcattgttgagctggctgggctcaccgactgcaacccagctctcactccgatggaggagaggctgaagctgagtcgcgatagcacgacggaggaggtggacgctacacagtaccggcatcttgtggggagccttcgctacctcgtccacacacagcctgacttggcatactccgtcggctacgttagtcggtttctgcagcgaccgacgacggagcatgagcaggctgtgaagaggatcatccgctatgttgcggggactctcgaccacggtctctactacccgaggtgccctggggaggcacaccttgtcgggtacagcgatagcgaccatgccggcgacatcgacaccagcaagagcacaagcggaatcctcttcttcctcggcaagtgccccatcagctggcagtcggtcaagcagcaggtggtggccatgtccagctgcgaggtcgagtacatagcggcgtccactgcttcggctcagacgctctggctggctcgactgctcggtgatctcctcgggagagacactggagcggtggaactcagggtggacagccaatctgctctggcattggccaagaaccccgtgttccatgaacggagcaagcacatccggctgagataccacttcatccgagcctgcttggcagaagggagcatcaaggcgcgctacatcaacaccaaggatcagcttgcagacctgctcaccaagccccttggtaagatcaagtttgttgagctttgctacaggtccgggatggcccaactttctcacaagacgacgcccaagacttagggggagaatgatggaataagtcttgagcatctagaggacagcctgcttttgactgtcatctgtagtcctttagcatctagaggacagcttgactgtcctctgtagtctatttagcatctagaggacagcagtcgcttttttgactgtcctctgtagtcgctttagcatctagaggacaacagtcgcttttgactgtcctctgtagtcgctttagcatctagaggacaatcctgttgtgtagtgtgtgtgagaaggtgtggtagtgcagcccctagggctataaatatgtgtccccaacccctctaagggtatgccattgtgtagtgtttgaagaataaacagaaaattgccccaactcatagtgtcatcctcttgatgagagttagagtccctctacttacagagccatctccagcggcaccggccgcagcggcactcctccaccttgatgagtcgaaagcacgcgttttcctcggcgacggctccaacaaggacatgatcgaaggatggtgcctcgacaccggcgccactcatcacatgaccggccaacgggagttcttcaccgagcttgactctagcgtccgaggctccgtcaagtttggggacgcctccggcgtagagatcaagggcgccggctcagtcgtcttcaccgccgcgtctggtgagcacaggctgctcaccggagtctactacatccccgcgttgagtaactctatcatcagcttgggacagctggatgagaacggttcgcgcgtggaggtcgagcacggagtcatgaggatctgggatccctctcgtcgccttcttgccaaggtacgcaggagtccaaatcggctatacatcctcaatgtgaaggtggcacaaccttgctgccttgctgctcgtcgagacgacggggcatggcagtggcacgagcgcttcgggcaccttaacttcgaagccctgaagcggctcagcgccaaggagatggtacgaggcctgccgtgccttgaccatgtggagcaattctgcgatgtctgcgtgttgacaaagcagagacgactcccctttccccagcagtcgagcttccgagccaaggagaggctcgagctcgtgcatggggacttgtgtggcccggtgacaccagccacaccaggaggacgacgctacttcttgctgctcgtcgacgatctctcccgctacatgtttgtgatgatccttggcagcaagggagaggctgcgaacgccatcaggcgtgtgcaggtcgctgcggaggcggagtgcggccgcaagctgcgcgtgctgcgcaccgacaacggcggcgaattcacggcggctgagttcgcatcgtactgcgcggatgagggcgttcagcgtcactactccgcgccgtacagcccgcagcagaacggcgtcgtcgagcggcgcaaccagacggttgtggggatggctcgggctctcctcaagcagagaggaatgccagctgtcttctggggagaggcggtggtgacagcgggttacatcctcaaccgctcgcccaccaaggctctcaacgggatgacaccgtacgaggcttggcatgggcgcaagccggcggtctctcacctacgggtcttcggctgcctcgcgttcaccatggagcttggccacatcagcaagctcgacgataggagcaccccgggggtgttcattggctacgcggagggctcgaaggcctaccgcattcttgacccaagaacacagcgtgtgcgcacggcgcgcgacgtagtgttcgacgaagggcgaggatgggcgtgggacaaggcggtggacgacggcacgactccgacgtacgacttcaccatcgagtacgtccaatttgagggagctgggggagtaggcaactcttctccgagcaggtctaccccagcccccaagtctccaccaactccagcgccacactctctagctcctgctacaacgagctcttcaccaccacgcactccagccacgactccggctacagcgagctcttcgccaccacgtactccagcaccgacggtaccctctccgggaacgtcctctccgacaccagctcgtgtcgagcacgacccagtggagctcgtaacccctctgtcccgcgacgaggagcgcgtcgacgcgtgctacgacggcgagccgttgcggtatcgaagggtggagggccttctcctcgacccgtcggtgccaggccctgcatctcgcattctggcgggagagttgcatcttgcatgcgacgatggtgagcctcggtctttcgcggaggccgagaaacatgcggcttggcgttctgcgatgcagtcggagatggacgcggttgagacgaaccgcacttgggagctcgctgatctccctcatggtcatcgcgcgatcacccttaagtgggtgttcaaactgaagagggatgaagtcggcgccatcgtcaagcataaggctcgcttggtggcacgcggtttcttgcagcaggaggggatcgacttcgacgatgccttcgcccctgtagcacggatggaatccgtgcgactcctcctcgcgctggcagccctggagggctggcatgttcatcacatggatgtcaagtcggcatttcttaacggcgacttaaaggaggaggtctacgtacaccagccgccaggttttgcgatccctggcaaggaaggcaaggtgttgcgcctgtgcaaggccctctacggcttgcgacaggcaccaagggcgtggaatgccaaactggattccacgctcaagaggatgggcttcatgccaagcccgcacgaggcggccatctatcggcggggcaatggagaaaatgccctgctggtgggtgtctacgtcgatgacttggtgatcaccggcgccaaggatgcagaggtggcagcattcaaggaagagatgaaggccaccttccaaatgagtgacccggggcacctctccttctacctggggattgaggtgcaccagggggactccgggatcacacttcgccagaccgcctacgccaagcgcattgttgagctggctgggctcaccgactgcaacccagctctcactccgatggaggagaggctgaagctgagtcgcgatagcacgacggaggaggtggacgctacacagtaccggcgtcttgtggggagccttcgctacctcgtccacacacagcctgacttggcatactccgtcggctacgttagtcggtttctgcagcgaccgacgacggagcatgagcaggctgtgaagaggatcatccgctatgttgcggggactctcgaccacggtctctactacccgaggtgccctggggaggcacaccttgtcgggtacagcgatagcgaccatgccggcgacatcgacaccagcaagagcacaagcggaatcctcttcttcctcggcaagtgccccatcagctggcagtcggtcaagcagcaggtggtggccatgtccagctgcgaggtcgagtacatagtggcgtccactgcttcggctcagacgctctggctggctcgactgctcggtgatctcctcgggagagacactggagcggtggaactcagggtggacagccaatccgctctggcattggccaagaaccccgtgttccatgaacggagcaagcacatccgactgagatagcacttcatccgagcctgcttggcagaagggagcatcaaggcgcgctacatcaacaccaaggatcagcttgcagacctgctcaccaagccccttggtaagatcaagtttgttgagctttgctccaggtccgggatggcccaactgtctcacaagacgacgcccaagacttagggggagaatgatggaataagtcttgagcatctagaggacagcctgcttttgactgtcatctgtagtcctttagcatctagaggacagcttgactgtcctctgtagtctctttagcatctagaggacagcagtcgcttttttgactgtcctctgtagtcgctttagcatctagaggacaacagtcgcttttgactgtcctctgtagtcgctttagcatctagaggacaatcctgttgtgtagtgtgtgtgagaaggtgtggtagtgcagcccctagggctataaatatgtgtccccaacccctctaagggtatgccatagtgtagtgtttgaagaaataaacagaaaattgccccaactcatagtgtcatcctcttgatgagagttagagtccctctacttacagagccatctccagcggcaccggccgcagcggcactcctccaccttgatgagtcgaaagcacgcgttttcctcggcgacggctccaacaaggacatgatcgaagaatggtgcctcgacaccggcgccactcatcacatgaccggccaacgggagttcttcaccgagcttgactctagcgtccgaggctccgtcaagtttggggacgcctccggcgtagagatcaagggcgccggctcagtcgtcttcaccgccgcgtctggtgagcacaggctgctcaccggagtctactacatccccgcattgagtaactctatcatcagcttgggacagctggatgagaacggttcgcgcgtggaggtcgagcacggagtcatgaggatctgggatccctctcgtcgccttcttgccaaggtacgcaagagtccaaatcggctatacatcctcaatgtgaaggtggcacaaccttgctgccttgctgctcgtcgagacgacggggcatggcagtggcacgagcgcttcgggcaccttaacttcgaggccctgaagcggctcagtgccaaggagatggtgcgaggcctgccgtgccttgaccatgtggagcaattctgcgatgtctgcgtgttgacaaagcagagacggctcccctttccccagcagtcgagcttccgagccaaggagaggctcgagctcgtgcatggggacttgtgtggcccggtgacaccagccacaccaagaggacgacgctacttcttgctgctcgtcgacgatctctcccgctacatgtgggtgatgatccttggcagcaagggagaggctgcaaacgccatcaggcgtgtgcaggtcgctgcggaggcggagtgcggccgcaagctgcgcgtgctgcacaccgacaacggcggcgaattcacggcggctgagttcgcgtcgtactgcgcggatgagggcgttcagcgccactactccacgccatacagcccgcagcagaacggcgtcgtcgagcggcgcaaccagacggttgtggggatggctcgggctctcctcaagcagagaggaatgccagctgtcttctggggagaggcggtggtgacagcgggttacatcctcaaccgctcgcccaccaaggctctcaacgggatgacaccgtacgaggcttggcatgggcgcaagccggcggtctctcacctacgggtcttcggctgcctcgcgttcaccaaggagcttggccacatcagcaagctcgacgataggagcaccccgggggggttcattggctacgcggagggctcgaaggcctaccgcatccttgacccaagaacacagcgtgtgcgcacggcgcgcgacgtagtgttcgacgaagggcgaggatgggcgtgggacaaggcggtggacgacggcacgactccgacgtacgacttcaccatcgagtacgtccactttgagggagctgggggagtaggcaactcttctccgagcaggtctaccccagcccccaagtctccaccgactccagcgccacactctccagctcctgctacaacgagctcttcaccaccacgcactccagccacgactccggctacagcgagctcttcgccaccacgtactccagcaccgacggtaccctctccgggagcgtcctctccgacaccagctcgtgtcgagcacgacccagtggagctcgtgacccctctgtcccgcgacgaggagcgcgtcgacgcgtgctacgacggcgagccgttgcggtatcgaagggtggagggccttctcatcgacccgtcggtgccaggccctgcatctcgcattctggcaggagagttgcatcttgcatgcgacgatggtgagcctcggtctttcgcggaggccgagaaacatgcggcttggcgtgctgcgatgcagtcggagatggacgcggttgagacgaaccgcacttgggagctcgctgatctccctcatggtcatcgcgcgatcacccttaagtgggtgttcaaactgaagagggatgaagccagcgccatcgtcaagcataaggctcgcttggtggcacgcggtttcttacagcaggaggggatcgacttcgacgatgccttcgcccctgtagcacggatggaatccgtgcgactcctccttgcgctggcagccctggagggctggcatgttcatcacatggatgtcaagtcggcgtttcttaacggcgacttaaaggaggaggtctacgtacaccagccgccaggttttgcgatccctggcaaggagggcaaggtgttgcgcctgcgcaaggctctctacggcttgcgacaggcaccaagggcgtggaatgccaagctggattccacgctcaagaggaagggcttcatgccaagcccgcacgaggcggccatctatcggcggggcaatggagaaaatgccctgctggtgggtgtctacgtcgacgacttggtgatcaccggcgccaaggatgcagaggtggcagcattcaaggaagagatgaaggccaccttccaaatgagtgacttggggcatctctccttctacctggggattgaggtgcaccagggagactccgggatctcacttcgccagaccgcctatgccaggcgcattgttgagctggctgggctcaccgactgcaacccagctctcactccgatggaggagaggctgaagctgagtcgcgacagcacgacggaggaggtggatgctacacagtaccggcgtcttgtggggagccttcgctacctcgtccacacacgacctgacttggcatactccgtcggctacgttagtcggttcttgcagcgaccgacgacggagcatgagcaggctgtgaagaggatcatccgctatgttgcggggactctcgaccacggtctctactacccgaggtgccctggggaggcacaccttgtcgggtacagcgacagcgaccacgccggcgacatcgacactagcaagagcacaagcgggatcctcttcttcctcggcaattgcctcattagctggcagtcggtcaagcagcaggtggtggccatgtccagctgcgaggccgagtacatagcggcgtccactgcttcgactcaggcgctctggctggctcgactgctcgnnnnnnnnnnnnnnnnnnnnnnnnnnnnnnnnnnnnnnnnnnnnnnnnnnnnnnnnnnnnnnnnnnnnnnnnnnnnnnnnnnnnnnnnnnnnnnnnnnnnnnnnnnnnnnnnnnnnnnnnnnnnnnnnnnnnnnnnnnnnnnnnnnnnnnnnnnnnnnnnnnnnnnnnnnnnnnnnnnnnnnnnnnnnnnnnnnnnnnnnnnnnnnnnnnnnnnnnnnnnnnnnnnnnnnnnnnnnnnnnnnnnnnnnnnnnnnnnnnnnnnnnnnnnnnnnnnnnnnnnnnnnnnnnnnnnnnnnnnnnnnnnnnnnnnnnnnnnnnnnnnnnnnnnnnnnnnnnnnnnnnnnnnnnnnnnnnnnnnnnnnnnnnnnnnnnnnnnnnnnnnnnnnnnnnnnnnnnnnnnnnnnnnnnnnnnnnnnnnnnnnnnnnnnnnnnnnnnnnnnnnnnnnnnnnnnnnnnnnnnnnnnnnnnnnnnnnnnnnnnnnnnnnnnnnnnnnnncgagagctgtctcactgagttgtgagtttgaagcagtctttccgcatttgcgcggggggggggtgatggaataagtcttgagcatctagaggacagcctgcttttgactgtcctctgtagtcctttagcatctagaggacaacagtcgctttttgactgtcctctgtagtctctttagcatctagaggacaacaatcgcttttgactgtcctctgtagtcgctttagcatctagaggacagcagtcgctttttgactgtcctctgtagtctctttagcatctagaggacaatcctgttgtgtagtgtgtgtgagaaggtgtggtagtgcagcccctagggctataaatatgtgtccccaacccctctaagggtatagcattgtgtagtgtttgaggaaataaacagaaaattgacccaactcatagtgtcatcctcttgatgagagttagagtccctctacttacagggggagacttgtctcggtttatccctcccttagaccccactcatgtgggagcctccgacattggatgtactctatttgttttaaatatatgcagataaatattattttctaacaatggtgctaattcatgtataaaagtaaggagtaaaatgcatcaggtccccgaactctcaaaactaggattacgtgtcttcgaacttgacgtcttggccggtcatccaaaaccagatttgctcaaactggatgccgatgtggcgtgccatgttggagtcactttggtccccgaacttggcatgctgtatcacttgggtctcagaacttggcattttgtgccacttggcttcccgaactttctttagtacgcttcagcgtggcatgctacgttggcatcgggtttgaacaaactcggttttggatggccgactaagttcgaggacccgttttgctggttttgaaaattcgatgacccaagtgacaaatcatgctaagttcgaggaccactgatgtattttactcaaagttaagttttgggatgtgtttattgggctagggcatgctagtggggtttctctcgttgcaaaacaggggcttgtttgcaaatagttctaaaggcaccttgtgtgtgaaatgtgggttctgtgtgccaatgtcaacaagttttatggatcttgattatagatcgaattgctagaaatatagtagttcaaacagatattggaactggagctacaatttagtcattaatatactattacttcaagtatgtatgggtatcaactatcaaacataggttgtgtttgcttcagcatctgaaaagtgcttctgctctactttattgtattacaatttaactagcaccttggactatacttttggcttccaaccttttacttctccaaatggttggaaacagaaagaaattttacatgtgtatccagggcatgcttatcaagacgtccattaagcgtcacattagagtcgctttagcgctaaggcgcactcacagggcaaggcgtctagcttgccttgtgctggggagtaagacgtccgccgcggcgtaaggcgctggtggggcgtcggcagggcgttctcggagcgtcggcggggcgacgcttaggggataggtagggttttgaagggcgacggctggaaacagagaagagggtttgacctgtgtctgtgtggcagctgcagctgctgcctccttcctcgtcggcgcgcagtgctccggccatcggaggtgggagactgcggtggaagaaccgagggagagagagagaggagagctgtgggggagggagagagaggggactgaagagagatgcagcgtgagggaaaaatagaggctggcggctgctactaggttgctggcggctgtgacctaaaactgtgttttgggctgagctgggccgagttgggctggactcacttgttgtgaggttctttcctgccttttttttctgcttctactagactgaaattggacatattagaccttataaaagtgctagcttgcttattaactttaaattagtgatatataaataatgtttgatctaatttttttgatatttatctatataactaaggcctcgcctcgccttacgctttatcgcctaaaagataaaagagggttggtcgccttatgtcgccttaccgccttaataactatgatcaagggagagaaagaaaggggtaggcttcatagttgtttcaaccaaacaatttatctttttcatagtgcatagctcacatcatcttttccaaagctcacaactcacaacaacttttctatagcttagttgacccaaacaagcccataattgctttttgtttggacctaccagctaattactcatgtgagagcctctgacactaggtttgtcctactaactaactacacaacacatcataggtacgtaacctttagctctctagaaaacttgggcaagtaattcagccaccctgaaatggtgctctataaatgtctcggcttgccaaattttgtttgggccagccaaaatttgacctccaccttgggctcaactctctgaccatattgggcgcttggatcatatggaatggaaccactgtaactgttgttttattgatttttttctcgaaaagcgcaggagaactgcaccccattatattaagaccgttgtttttattgatgctaagtgtttctgaagccatgatcgtggcaggagaagagcgtcaactttggtctatgacaggggctagaggaatctcctgcttgattgtccccaaggttttgagtgcttttttagatgggacattctatgtctcctttttaatcagtgtgtttgtaactattaaatgtggtgtttgttgtgtgggttgtggttcctaaccgaatttcttcttaatataataaagtgccatctctactgcattttcgagaactttttttgacctccaagtggttgccagattgttggggcacgaccaaattttgattttgcatcctatgagtctcatactaaacgtgtcgtgaatatccttgttttatccatgatcattcatttattcatttgcttgtgccttctgtgtagacatgttttttttgcaggtatatgtgtggttgcacactcataagttgcagttgctactaccttgttagttagtctatggttttgctgctttgattgaaccaaaataaaatgttagttgcaaacttttgtcaactcagctgtgtctgtcatttgtttagtattgtcctccattatcattaaggatcagagactttgtaaatggattagtttttcatgaatgttatgatgaaaaatgatattgttctgttctttaaatatattctttgctcgcaacttatattaattgtccttgggctatgttctcatgtctattgcaggttgaatgtttacttgtagaaggtgtcttgggcaaaaggaatcttgtgtattgtgcatccacgaggtgtttgcagatctttcatgtcgttcatacatggacatacctacacacttcacattctcagatgcgtactgtttttttttcaaattccttttctatctaatcttatgtgtatattttttgttgttaaatttgcagtgctggtaaaagttttgttgctgaagttctgatgttgaggcagatactgtcaactgggaatatggcaattcttgtccttccctatgtgtcaatatgcgctgaaaaggtttttgatgatttatacagctttggattggtctgaaacatacttgtgtttgattatttatttatcttttacaggctgaacatcttgaacaacttcttgagccactgggtaggcatgtccgtagcttctacggaaaccaggggggaggctcacttcctaaagatacagcagttgctgtatgtaccatagagaaggcaaactctttggtaaacaagttgttggaggatggccgcctctctgaacttggtgtaattgtcatagatgaacttcatatggtaagcttgtctaaaaccgaagtgctgctcagaacatcctctctttgctttaaaccttttgttgttggtactttcatggttatttataccacatctattttgttatgcaagttcattgccttaggaactgtcatttcagcaatctaggtttgtgacagcattgagagtactaacgtaattttgtaacatttccattgtttgtaatcttttaatagcatgcacgagataattgccatttaatgaggatatttgttggcctgttgttagctattagtgctccttggccagtgtgcattgtggaattggatttgttttatgaaacagatggagcactagagatctggtactatctggaatctaaaaagtagagcgtgtgcattttgtatgactttcttctttaattaatacaatgatacagaactctcctgcatattgaagaaaaaacgatgtacaattgcattgcaagtagtagaggttttatcattgctaactaagagcactacaaattcttgtataggtggtgtatgtggtattggtgtactgcatatatcaatcagaacttcaaatatgatttttcctctcccccttctctccgcctgggccgttagggagtgaattcagtccaacgcctaggggctagggccaccaatctagtccaagtgatgtacctttccctactgcatcattgtttagttttttaggtgttcttttttgttcaaggtttgggatggttagtcatcaacttatcacccatcctatctaatcaagtaatcttgtgtgttactttacctgttacccgagtttccatattgttaggttataatcattaagagtaatttgtaaataagaaaggtttgtcattatggacaattgccagtaaacaagaaacaacaaggagaagtaccattggtcctggcgctgaatgaattctggcagcatacttatcaaatgcaaatcatataggaagatttgactttccttagggctcccctcatatatttgtaatattaggcccaggaccaatagtctcccagctcgccattcggctaaagcactatggcagtattactatttagcaacccctaccaaaggaagcatatagcttgcatctttacctgtctttgtttacctttccatgcccttgagggttctttcaatctttcttcctgtatcctttgacttagtttgtcgaacatgatgtgatatatagttgaaacttgttaagttctccaattatgcaattaaattaacaggttggtgaccaacatagaggatatcttttagagctgatgttgacaaagcttcgatatgctgctggtgaagggactttacagtcatgtagcggagaagtttcaagttctagcagtgggaagattgcaagtcatgggttgcagataattggtatgagtgctactatgcccaacatcgctgcggtggctgattggcttcaagtaagatatttaattctcctagttttatgtacttaatgaagggatgttttactagtgtgagaaacaacattactaacccacagaagttcaacttagcattgtcgttcatttatcatattagaaagttcaaaggcatttgataaatatgtgagcaattgaacttcctaattccacttgtattttctttcatcaactttttaaggttttttttgctgtctttcttcaaacctatagcctaacatgatatcttcatcaatattatctgatcgtatgatcgaggctactcgtatgaccaccgatcatatgactaatcactattagtcatcgattagttggtctagccagctagtcgaacatttagttgtccatgtgcctagatgacctaatcgaccatgccgagttagtatccatcgctagtctccttcgcgtcgccccacatgggcaacacgggcggaaccaaccctagcaacgcaccttcttcctcacctgattctcctcaccgtcactagagcgcgacttcacaaggaaggcaatggcatgtcattctcctctgcctcgtgatcatcgactctatcaagctcctctaccatggtttgagaaggtgctcctcccagtggccaatctctagattctagatccaccgatctctaggccagacctgcgctggttgggcctatggtggccacacagtggcagtgcagttgtcccctctcctctcacaactcttcgttcgtctttggtgggtgatgcctagatccatcgtcactgtagccggatcaggcatctcccgtgacaacggatctgcggagggcgacaacccttgtggtcccaacttcattttcaagcatgttcgggtgcttctcggctctagcactcggtcaactttggcttggcattggcatgtggcgcaaatgcaatagcaactgcattgctagcttgcatggccaccaaggatgggtgctcttagtgaggcaaacaagtgccaaacctgcaaccatgacataggagatggtgggcttgctcaggcttgcgttggtgtttgtcggtacctcaagactagggtacccactcctactggatcaaggcgggacccctgtggctatccctagtcgcatagccacaggtggtccgccctggctcagaatataggttcgtccgacgaggccgctggcctcaggtgggggccaacttccatgttgggctcttcagatccctagcagcggggctccgaagccgccacatgctccaagtatggggactccctacagctttgcctaggggcctgaccccctctgggtggtcccggacacctgcgtatgctacttgaacctccgacttaaagaggtccggtattgccacgtgtttaggcccgtgccagagggtcccggactcctctgagtaccttccgaacccccaactagtggtgctccggatctgccacgtctacagacactcctggctgattgctccctgctcgggtaaagatccggtgctgccacgtgtcttatggcgtgtgacataagccgtcgggaagagcctggcgtaagcctctggcaaggggaagggccacctgtgttcaaggcgggcagagtgcgcggctgttcacacaagtaatagatggcgcgtaccccgcattaaatgtaggtggcgtgcgcaacctgcaaggcctgcccgcgtcagaatcgcgttaccaaggcaagcccattgcgtagcttggacgcccttcattatgacttctattcctcgcgtgttattgaggcatgagggaacaggcggaggggacgggatgacaccgtccttattctccctacgctcacctacgccgcaacctacgttgtagcctttgcccacatgtcgtagcccctcctcatcttaggattagggcgggtgttatccgtcacctgtctggagtttacctctgaccgtgttgatgtttgtgtggttcgtctctaggtggtctttatagggcacgacaaccatggttggctacaacgagccttgtttgtgggcgtagcttttcacctgcaatggctctgaactagctcgagagttgcatgcggtggtggacgacaatcaacttcaccaggactacatgagtaactatgttgactacacatgttggtgtgaggagagatcttggtgcaagatttggttagtattatcttgagtcgatgatgataacacctttggggggggtgccattcccttttttggaagcgtcgatgaggtgccgtctctccttaccccacgatttgttttgaagaagctctgcctagggtccctaggctggtgatggcggcgcccagcgtcgtatcctgcctgagggcatcaccttgatcccgtactaccatggttgttggtccgcatgggacatttgctgcttgtttgtaagcctcaggttttgatgagttcgctacttgcttaaagcatgtcttttgctctcctagggtagatcaataggtgaagtcagagctgcttttgtggggtgcaacaaagcttggcaatgatgacacattatgttcacttccttcaaaagccgggtcttgttgtgagtaggtggtggtgtgttagggctttggctgatgttcgttgtgggaaatcagatctacgtatcacttttgtgggataagctcgacatcgatgacgtgtggtgtgctctgttggttgtttttgtgtatgtgggttgcttaggattagtcgtatgggttgttgtgtttaggtattggccggttttcctttgataaactgtgtgatgtggtgttttatccctgggtttccttataacctaggtcaattctatttcttaattgaaacttcctagttcctactgcgttaaaaaatgacctgatcaaccatgtatataaataaatttgatataaattggtgaatgggagaggcaagcaaccaagcacattaataacatttccaccttcctctccggcgcggacgtcgcccacctctacgcgtctagcatcgccgccgccgctactacggctccccaggcgttcaccgtgaccaccgccgctgctgcagccactgcggctggactcctacccccaacctctatagcagcctcgacctccctggctacctgacctccacggccgccttcagtgccgcctcgacattcgggactctctccccgaccgacttctcccggcagtcgcccctcggtttcaccgcccgcctgtcgtcgacgtcacttgggctccaccacgtgccgtcgcgccgtccaacgactccgccttggtcgctgccatcgccaccatccaggccgccgtggccgcctcacaggagcgccaacgcgtcgcattactccctctggagcaggaatgggccatgggttaggccctgaccactcagctggccacggctcagcgtatgcttctcggtcgtggcaccccgccaccaccggcagtgcttgcggctcccctggtggtcccggagcctcctcatggctctgggcttgacgtcgacactatcgccgccctccacgcctaggccgctggggttcacaacatacagtccctcatgttggacccgacgtcctcccactaacctcactggcgcgctcaggtggtcctcacccttcggcgtttgccctcactgaccacgtcctcgacgatctcgttgcctcgctgtccccctcctgggtctagatggacaacgtggtcctatcgtggctcaacgacacaatcaccgttgagctgcaggacatcgtctgtgatcaggcagacactgcgcgccagacatggcttgctctcgagggccagttccccaggaaccaggaggctcgggtgctccacctcgacgtccagttccatctgttttctcaggggacctctctgtgggagagtactgccgccagatgaagggcatggcgaactctctccgcgacctcggtgagcctgtcgccgacaacaccaaggtgctgaaccttctacgtggcctcagcccccgctacggccaccggaaggctctcatcaagaggaccgtgcctcaactcccgctatggtcctctcatcaagaggaccatgccgtgcggaacgagcttctttttgagtagctcaccatggagaccgaggctcctccggcatcgacactctacaacgctcctcccggcggtcagacaccctcggggggccaggcctctcgctctccatcgaccgaggcccctgctcgccatccacccgctgtcattgcgactcctcgtccggctttcaccgccgacggaggtcgtcgctccctcaagggcggccgtggggtggcagctccacccgtggtggtccctccggccggggtggcggccaggcgtgaccgtcattctacaacccctggaccaggaccatcgccatgtggccgggctaggcctcgagtgcctcccgctttccggcgtcggccctccagacagcgcctccctacgacgtgccttcgatgcctccctacggcgtgccaccaacgcctccggccgcgccctagcacccgccccgaggaccaccacctcgacgccttggtccccgctggctggcggatggggccctgcatccctcgtcaccgccttcagcaccatggcgatgaccccaccccctccgactgggtggttgattccgagcttcttaccacacaactcccactgcagacacgctctctttgtcccatcccatccattcctcccacccctcctggatcctcgttggcaacgataccactttgccggtcacctcaataggtgcctcggttttccctgggccgttctatctcaacgacgttctcgtagcccctcacataactcacaatcttctttctgttcgtcggttcaccaccgacaacttttgttccattgagtttgacccctctggttttctgtgaaggatctagccacatgacccctctcacccgctgtgacagcgccaagcccctctacacgcttcggccttccaccaccgacgcgtctccacctcccgtcctggtctccaccaccacctctaccacgtgacatcattgtctcggccacccaggacctgatgtcatgaccaaacttaacaacaatttagatccttcatgtagtaggggacattttgatggtctctgtcatgcttgtcagttagaccgacatactcgtctcccattcaccactttttggtttgaggagtcttttgacctggttcattgtgatctctgtacctcccctatactcaatctctttggttataaatactatttggtcattttggatgatttttcccattttctttggacctttcctcttcggttgaagtccgacacgttcaccaccctcacacacttcttcacctaggtctccactcagttccgtcgcccggtccgtgccctacagtgtgacagtggccgcgagttcgacaaccatgcctcccgttctttctttctcaccaacggcgtccagttgcgtctctcgtgcccctacacctctttccagaacggccgggccgaccgcataactctttctcaccatttgctgccttctcttccaggcgtctgtccctgccagctactggggtgaggccctacacaccgccacacaccttctcaactctcttccctcgaaggcggtgagccaccctactcccacttcgccctgtacgacacaaccccttcctacgaccaccttcgcgtgtttggctgtgcctgttatgctaacacttccgccatcgctcctcataagctatctccttgctccactcgctgtctcttccttggctagtcccctgaccacaaagggtattgctgtcttgacctcagctcgcaccgtatcatcatctctcgtcatgtcgtcttcgacgaagatgtgtttccttttgctggctcctcccacccaccgatctcgactccctacttgagtctgatccggttacccctctataagtagatggactctaactctcatcaagaggatgacactataagttcgggcaattttctgtttatttcctcaaacactacacaatgccatacccatctaagggttggagacatatttatagccctagaggttgcactaccacaccttctcacacacactacacaacatgattgtcctctagatgctaaagagactacaaaggacagtcaaaaagcgattgttgtcctctagatgctaaagagactacagaggacagtcaaaaagcgactgttgtcctctagatgctaaagagactacagaggacagtcaaaaagcgactgctgtcctctagatgctaaagagactacagagtacagtcaaaaaacgactgttgtcctctgatgctaaagagactacagaggacagtcaaaaaaacgactgttgtcctctagatgctcaagacttattccatcagcctccaccctaggcgtcccgccttgcgccgttgcctgtaccatgtgcggcctcgacgcctccactcgcgcctctaccggcgcggcgacgacaccgtctacctcctgctctacgtcgatgatattgtgccgacatgcaccgtcgacctcctacagcgcacgatcgtcggccctcagcggtagtttgcgacgaaggacctggggcccctccaccacttcctcggcatcaccgccgaacgctggtcccagggtctcttccttcaccagcgccagtacgccatcgacatcctggagcgggctggcatattcgactgcaagccctgctccacgcctgtcgacacttaggcgaagctctctgaggacggcggcccccggtcgccgacgcgacgtcttaccggagcctgaccggtgcgctccattacctgaccttctctaggcccgacatcgcctacaccatccagcaggtgtgcctgcatatgcacaccccgcgggagccccatctcaccgctcaagcggatcctgtgctacctccgcggctacctcgactacgacctccttctccgaccatccccgacgtcggagctcgtggtctacaccgacgctgactgggccgattgtcccgacacgcgccggtccacttccagttctgccgtgttcctgggcgccaacctcgtctcctgggctgccatgcggcagctcgtcgtctcccgctccagcgccgaggtcgagtattgcgctgtggccaatggtgtggcagaggcctcctagatgcgccagctactacacgagctccacatctctcttcagcgcacaaccctcgtctcttgcggcaatgtcagtgcggtctacctctccaccaaccccgtgcatcatcagagcacgaagcatgtggagatcgacctgcagttcgtccgcgagcgtgtcactgcctgtgacgttcgggttctcagcgtccccaccacgctgcaatacgacgacatcttcaccaaggggttaccgtcgagtgtatttttagactctcgatctagtctcaacatctgatctgtacaagatagagttgcgggggggggggggggnnnnnnnnnngcagattttaaaataaaggtgcacagatttgcttcagctctcttcgcagcctctgtgtgttcggtggttggtaatggggcaaacactctcttctggacagataaatggcttcagggccaatctttgctccagattgcccccgcgctaataaatcgggtgcccgcgaatataagacggcgcagatctgtccaagcagccttaacagccaatggttgggtgcatgatatctctggaagccttacggcgcaggtgctgtttgaatttttattggtttgggatttactccaagaggtgcaactgtaccctaatgtggaggatcaacatcggtggttgccatcctcctcggggctgtattccgccagctctgcttatttgcgcttccatggtggtgcaacaacctttgagcctgctacaagaatctggaagacttgggcccccccgcgctgcaagtatttcatttggcttgcatctctcaaccgatgttggacggctgatcgactggcacgtcatggaatggatcatccagatagttgtcccttgtgtgatcagcaggatgagtcagtgcatcacttgctggtggattgtgtttttacgagggaagtttggtttacaacactaagcaggctaggtttgcaacatcttgctcccacgtctgatgctacannnnnnnnnngggggggggggggtgttagaattccatttacggtttggggttctcctcgtgtaattactctctcacccctgtgtaatgggccatgtcctgttaactcatgtctattaatacatcacccaaccccaagatagagttagggtttcccacactgtgtaatggactaggcctaacaacctgggtctattaatacaactcccaaccctgagttagggttaggttttcccacatgtaatagaggtaggttagtttctctcccccaccccatcccaaccgcccgcttctttcccagcctccggtcgccgtcagctgcatgctctagccgttgtccgccgtgtgctcctccctgtcgtcacatcctgcagccgccgaccccgccatggatcctccccaatccgtccctcccctctccttcgcgctggatgctagcgcggacgccgggcttggtgcgacggcagccgacctcgacatgcgcgccaccgcggccctcgacgcatgcacctcgcccgcgcaccgccgcgaacgccgccgccgtgtacgccgccctaggcgtgaccccctcatcggctgatctgcacggcgccataggcgtgtgccctcccttcgctagctcgctctttccccatggctcgtcgacccgctgcgctcgctgttggcccccctacatcgacggcctcgggcccctccgcggcgcctctcctacgaccttcgctgcacaacagcgccaaggttctctgcctggcttcctcgccctcgctgctcctacatggaccgaggacgtcgcttcctcgtcaggctcctccccaacttcctcgacattggttatggatatcgccaccatccaggcggctgttgcggcctcctaggaccgtgagcgcgccacgactcttgccttggagcgcgagcgcgccatggtgccgacttgaccacccagatggccgtcgcgcaacgcctcctcctcggtcgcagtaccaccccttcaccggtggcccctgggactccccatgcccaagggcttgatgctgacaccatcattaccctccatgcttaggtcgccggggtccacaacattcggtccctcgtgtgtgttatgctggacctggcgtcctcccactaccctcggtgtcgcgcttaggtcatcctcacgcttcggtgatactcccttgttgaccatgtcctcgacgaccccgtcgttccgctgtcaccttcgtgggtacagatggacaacgtgatcctctcgtggctcaacgacaccatcaccatcgagctacaagacatcgtccgtgactaggcgaacaacgcgtaccaggcgtggctcgctctcgagggccagttcctcgggaatcgggaggctcgggcgctccatctcgacgtccagttccacctgttctctcagggggatctctctgtgggagagtactgccgccagatgaagggcatgacaaactctctccgcgacctcggcgagcccatcgccggccatatcttggtgctgaaccttctacatggcctcagcccccgctacggccacctgaaggctttcatcaagaggatcgtgccttttcccacctttcatgctgtgccgaacgagcttctcctcgagggccccgccgatcacatctacgccgcatgaagcacgtgcagcatcagcacacggagcacatggagatcgatctgcactttgtccgtgagcgggtcaccgccggtgacgttcgggttctcagcgtccccaccaagctgcagttcgccgacatcttcaccaaggggctgccgtcgagtgtcttcgccgacttccgatccagtctcaacatctgtacaagatagagactgcggggggggggggnnnnnnnnnnnnnnnnnnnnnnnnnnnnnnnnnnnnnnnnnnnnnnnnnnnnnnnnnnnnnnnnnnnnnnnnnnnnnnnnnnnnnnnnnnnnnnnnnnnnnnnnnnnnnnnnnnnnngggggggggtgttagagtactgttagggtttcggggcttgtccctgtgtaattacttgcataccctcagtgtaatgagcttggcccatatagcactcccaactcagttagggttagggtttcattctccaacagttttgttcattatgagcacattttttgtcgacttgatttgttaatagtaagttattctgtgaaggtgctaacttttgatctgtttgggtaatatgaatgatttatagttgcatacctattataattgacgctatgtaatcttaggctgctctttatcaaactgactttcgaccagttccactggaggaattcataaaagttggtaatcaaatatttgataaagacatgaacgttgttcgtgtccttcccaaagtagctgaccatggtggcaaggatccagatcatattgttgaattgtgtaatgaggtaaatctgttatttacattgcaggtcttagtttttctctgttaaacactacaattttgaagcaaattgaatattgtacttgtatttgttccaggttgttcttcagggccattctgtgcttttgttttgctccagtcgtaaaggctgcgaatcaactgcaaggcatgttgccaagttcttgaaactaccctctgttggaacaactgatgttagttcggagttttcagatgctgcagctgctattgaggccttgaggaggtgccctgctggattggatccaatattgggagaaacccttccttttggtgttgcatatcatcatgctggtcttacggtatggaagctatcttctatcttcataagatacacaaaatatcaaatatatatatatatatatttatttatttgaaatttgcactgctaaatatgtgctaagtggtgagagtggtctcactaagccaccaggtcgcgggttcaaagcaaccccttcacatttgcgggggaagggttgccttggttttatcccttccctagaacttactcacatggcctccgtcactgggtctgccctttacactgctaaatttaataaagtgatgccatttttacctaaccacagctgggcaaagggtggtaggaactgatctgccattacctgttctgattgatccaatgagcgtcatcgccttctgttctgtggcaggtcgaggagagggagattgtggaatcatgctaccgtaaaggccttgtccgtgttctgactgccacttcaactttagctgctggtgttaacttgcctgctagacgggttatattcaggcagcccaagataggtcgtgattttattgatgggactcgctatagacagatggctggtcgtgctggtcgaactggaatagacacaaaaggagaaagtgtaagctacaatatctttgttccactttattctattagagaatggttctgacatttcactagttctgttttaattgtgtttttaactttagcctaccccaactgcttgggagaaaagggctttgttgttgttgtctaataatctgacatttgaaatgcatgcagatacttgtatgcaggcctgaagaggtcaagagagttacaggtattattagaagcaattgccctcccttggagtcctgcctctcagaagataaaaatggaatgactcatgcaattatggaggttgttgctggtgggattgttcaaactgcaaatgatattcatcgttatgtgcggtgtacgctgcttaattccacaagaccttttgatgatgtcgtgaagtcagctcaagactcccttcgttggttatgccataaaagctttcttgagtggaaccatgagaccaagatatactccgctactccccttggtagagctgcttttggaagttcactcaaccctgaggaatcattggtagcatacttgtcttttgctccttcattattttattgcattgagaaagggcctctagctgagttggttaggtggtctgagtagcactccttaggttctaggtttgactttccgtgggagcgaatatcagcctgtggttacctcccatttgtctgtcccacaccaaagcacaggtctaaggtcctgtctagatcgtagtcgtttctcaaatgggctacggtgccgctgtgtatgggtggggcaggggttcgggggttttctcgacctgcgtgagaaggtcttcttaatataatacccgagggctgtcttatcccccgcaggtcgagttttttttttattttattgcattgtttaatcttgcatttttctgtttctgcactaggttgttcttgatgatctttcgagggcaagagaaggctttgttctggcatctgatttacatttagtttacttggtcacacccataaatgtagaccttgaacctgattgggaattatattacgagaaattcatgcaactttcttctcttgagcaggtatgcaagtcttcttttgtcctattgcacttgaaagttcatttatcaaactgtaaatagaatatccagaaattcgagttctatctgtactcattagaaaatagttgaaagtgaattccgaaaacatgattttagttgctgttgaactaaatgtgtgaagcaaaagtgaattcagaaaatgcaaatcaaatttgttacggttataatagtcataatattagtgtaatcttctagtctagggtttccctcatgtttctcatgtactcttatagtgcttattcatccaattcagtgcttgttaatggaatgtgtgaagtctatttcggtatttttacataaccatgaatcagactaaaacatgcatatgtttattgaactccttcgcactgtacttggttgcagtttactacatatgttatttgacctggttcataagatttttttaggagttgtcagttcttattagttttttgtaattcccatgttttctttggcccaacaagaaacagaacaactgacatgataccatgttttctgcagaacattaatcttttatcagtggtattatcattagtgccaaaatgtttataactgtatgccatgtctaccctactaaggcctaagactgtgtccaacactgttttgcactgttcacagagtggagccaaatgtgttcgcttgactttaatccgtaccggcttctattgtttctacagtatttttgtctgtatagattgcagctacagcagtccaaacagttggctttaatctgcagtagctacagacccttttggacttgcgcactgctcatgcgaaaagtggatgcgttactgttcatgtcgggtcctgggtttgttaagacagatattagattagatcgggttgacttgttggctatttctttaactctagaaaatagttaaggatcaaatctacacatctctattgggattgtatctactttgaattaagtaagaaatagatagttcaacagttcctatctggctatctacctccttaacactggctttctcgcatggccaacatgaagtatgcctgtgacaccgtatctttctgccatattggttgagaaatcaaaccattacttaaattatcaacttcagttcagttcatagaacacataatttcactcatttttttaatttctgtttgttttgttggtacaatgcagtcagtaggcaatcgggttggagtaattgaacccttcttgatgcacatggctcatggggcgtcgataccttttcgtgcaaggcctcagagaaacaccgggttaagtaacaagtctgcacaagctgctggaaatactcttgttagtgagcacacaatcagagtgtctaagcgcttttatgtggctttaatgttatcgaggcttgctcaggtataatctaagaactacttagacattgcatgttagttctatgtcaatgcatagtgctcaagatcgctagaaagcctaagtcgtgaaatgtaaaaaatagttcaatagagattagataatgaaggttgaaatgttctctcattatatatggctaattaaaatattagctcatgtcttatatttttgtagaatacacaagagagctatgtatcatttcattgagaagggtataaataaataagttacaacacacccaccacactcacacatatacacatacaaacttgtactggaaacaattcacaacacacccaacatgccttttgcatcagaacaagacccttgggtgggcatttggggaactaaaaatttgtgggtactagaaattgctacccaatttcgagtttcgacctcgaaaaagcattagccaaaattttagatacttgataatttgagttccagttttacttggtgtacctgataattccagtagcattttaaagtaagaaacaaaagtccatcaaatcatttcatatcaattaacaagaaatcaattatcaagatagtacaaatctacattgagccataccaaataatagatttacactatactgaaccactccatatcttcatattagaaaatagaagaacaaaatttttgagatattttgcgtaattcgggtataaatttacccaaactacctgaatggaattcagttttctatagctactattacgaagatggtttccatggtgacctgctagatgggctatatgggcgactcagtttgtgggaatcttatccaaggtatcaaaggtgggacgacaaccactcgaccagccgtgtttccacctgtgaattccttcacgatatgcctgccatctatggctatggcctcgcgccacctcccttttatcaaaccacgcgagcaacgtccctcccatcgggttttcaatgtttatactcgtttgtcaaaaaggaaaatgctctcttgctcagtttcttggcaacatggactttcaagaaaattttcagacacctttttggctctttctatggaagccaccgaagaatacctcaagttctatgatacaattatttcagttcaaaacaacatgcaaggcaaggataaatggatctattcttggggaaacaacaatctacgttcaagcaagatttacatattaaacttacaatccatgtacccaccttctcctttcaagtggatctagaaatccaaagtgagtaaaaagatcaaggtgctcatttggctgaccttcagagacagaatcaactcaagaaattttcttcgaagaaagatgtgtacaattacaaatgatgattacaaccatgttctttgtggccttaattgtgaggaaaccacatatcatcttttatttgaatgtccattcagtacattgtgctggaatcatgttggtattcactgggatcaccctttggatttttttgaaatgaccatatctgcgagggatcaattcagtaaaaatttcttcatggaaattctggctgttacgacctgggagattttggaagcaaagaaatgctgctatcttcatagattcctttccatcttttacgtcttggaggttttgcttcaatgacacgttggggctacaaatgcatagaatgaactcgaatcttagcttgtcgatttccttgtggcttgcttctttattttctttacttctatctccatttgcttctattcttccttccctttactgtacatttccttttttatttaatatataccactgtatgggccttccctacagtttcatcggtcaaaaaatgtccctccaatgccctccctactgccacagtctaccatgccacaggttgttgcagcactaccatgcgctcccaccatatcttgcccaatttcatgtgtatttacaagaatttactggtataagttgctgagaaagtttgggttacacagtttgacccctgagccaggacatacatccttcctagactggtgggaggagtcttctgaagaagttcatgggatggttaagaaaggtctgaactcccttatcatcttgggggcctgaatgatttggaaccattgaaaccgatgtgtctttgatggactgacttctagtctttcctcgatccttgtgtagactgatgatgagagaagggcaactttggttaaagctgtgctcactgctattcccatttatcatctaattgctttgcaatgtccaaggtgggtaatcaaggcaatagacaagattcgcaggggttttctttggaaaggaagaactgacattagaggaggacattgtgtcgttgggtggtccaaggtctgtcgtcccctctctcttggtgggttgggaattcacaatttggaagtnnnnnnnnnnnnnnnnnnnnnnnnnnnnnnnnnnnnnnnnnnnnnnnnnnnnnnnnnnnnnnnnnnnnnnnnnnnnnnnnnnnnnnnnnnnnnnnnnnnnggcccccccgcgctgcaagtatttcatttggcttgcatctctcaaccgatgttggacggctgatcgactggcacgtcatggaatggatcatccagatagttgtcccttgtgtgatcagcaggatgagtcagtgcatcacttgctggtggattgtgtttttacgagggaagtttggtttacaacactaagcaggctaggtttgcaacatcttgctcccacgtctgatgctacaaggtttcaagattggtggagtgaggcagaaagacaagtgtctaagcataagaaaaaaggtttcaactctattgtaattttagtagcttggcagatttggaagcatagaaatgcgtgtgtgtttgacaatgcttccccaaacattcacgcaattttgctgtccatccatgatgaggctttattatggggtcttggaggggctgctgctcttaggcaggtttggttgtagtttgatttttggttttttaattttcgggggtgctttcttggcacctttgtactgggtcttttctagacccttttttcttatcttcttaatatatattgatgcgtggttctcccacgtgttcgagaaaaaaagatgatgagagaagaatatgggaattagctggggccaggggtctttccttcttggcaacacctcttcttgaggtctaacccccctggctctttagtgggtagtgtgagtgtttttacatggatcctttcatttatgcgtgctgttggcctctatagggaggttttttcttgtaacccaggtcttctttagaccttcctttccctaatatatttaaagcttagttcccctgcgcttcctagaaaaaaatatctcgcccaattctcatgcaccaaattcagttcccaacatcgtcttggctgattctaggatggtttgacacattatcgctggccttggtggactacattgccgctgcccatgcagtgtcgtgcttccacaagcttgaatttcattcatacgaatgattgacgtagtgtgagtagttcttccatggctaacacaccttggaggtcgacaagtcgtatcacctattcgaacatgacacgagcacactatcgtggatcgaattcaaggacctttgcaacttgtgtttttggcccccaattcgcaacaaccgcgttgacacattggctcgtcttcgattcttgaccaagatgcaagaataccaagatcatgtcatgccaacaagcgaagttgttcgctatgggatttccaaaatatatcaatcttgacatgaaattgtgggagccccaaaatcttcatataaaatcttcatataatcctatcatgatggcacacactgaacaaccatgaccctagtgtgcgttgtggcacactgaccaaccatgaccctaatgcacaatcagcactgatgctgaactccaacgaggaccactccaatgacaagcacatggacgagcaacaactctagcgttgcacctactctgtctattaacatcaatcgagttgtctaatcatcggaaacaagggttttgtcataattgtgatgagcaatacattcatggccatcactacaagtgactcttctacactgacgttgtcaactatcaggattatattaggtggctatgttgttgtcctcagtgtggccttcctgcgcatacttgcctcgtgttctagcggtaccagtgccacgtcttatgaaggggcattaggtctacatgcgcaagaagtctagctatggttaacgactccgtcaacaccacaaactctaggttcatggaccatctcctcaacatataagttgatctttttgctgaaacaagaggactttatcggcttggcgctgccaccactgcatgcacctgctactaaggacaactctagtagatgtcaatccatacatatacccacaactctagaagaataagctccatgctcgagaacaacatccaactgagtacattagcattgttgggccttgatgcttctcatcaagaaggttggcaactcatggaggttctgctttgactacagtgtgttgaattggaagacagtgaaggataaattttcgatcctgatggtcagtgagctactcgatgagccacccaaaattctttatctagctcgacctttggtcaggctaccaccaagtccacatctaccctgacaatgcgaaatgatgtttcttacacatcatggccacttcaagtttcttgtgataccgatgagcatcgccatcgcactagccacattcaacaacctcatgagcgacatgcttcgatagttgctttgctggctcgtccttgtattttttgatgtcatcctgttatagaacatttcttggatggagcatttgcaacatgtcaaggtggtgtttgatgtgctatgtgcgaacaagttgttcatcaagtggtccaaatgccacttcggtgtgttgttcgtctcctaccttgaccatgtgatctcggtgtatggcgtggctgtggatggcgaaaaggtggaagttgtggcatcgtggccacaactgtgatccactagggaactctgttgattccaagtatcgcgggtattacaagaagtttaacaaggactttggggtcatcgtagcacctctcatgaagctcttgaatgagggtttaggtggtgccaagaagcagaagatgccatgcaggggactcaatgggctgctatcaaccgcacctatactgcagttgttggcatttgacaagctgttcacggtagactgtgatgcgtcgagttgagtgcactaaggcgccagagcattgtcattctttagtgtaggtccttcgtagctcgacatctcaaggtggtagcctacgtgtgtgatacgattggcatggtgtaggcggtacaacgttggaggcatgggcttggtgcaggcggtacaacattggagtccctacttatggggttgaagccgatatggcattggagtccctagttacggggcaccattttctgcgcttaaagttcctgctcgatcaaatacttatcaaccccaacatcaatggatcaacatgctctttgactttgatttggttgaagtgtataagtggattgcctagcttctcccatcagcttaagcttttgggttgaactggttagtgtgtccactctaacatggtatcaaagccagaggtctcgagttcgaatcctgacagagacttaatttgtgcctccacccatttatttccacgtttgcgcgtttctctttgtctgcgtttgcgcctttctctctggctacacgtgagtggggggtggtgaagtgtataagtggattgattaccttctcccattagcctaagcttttgggttgaactggttagtgcgtccactctaacatggtaacagaaccagaggtctcgagtttgaatcctggcagaggctttatttgtgtctctacccatttatttctgcgtttgctccttttccatcagcttaagttttttgcgtccactctaacatatttcatagtgaagttttgggcaagcggaacacacttgctgacaccttgtccaatctcctattgtgacattgagactgtaggcactctcaagaccctcgttctagctctataacgacatttgccacgaggtccagacacagtgagttgggcgatccttggcggatacacgatgtcctcatcctccacgacaactagatcttcctagacacatcctctagcttgttgttcacttctttggagatcgcacaagacaagtgtccataaaaacgctcaagtgcctccaagtggacttttatattgctcgaggccgcaaggtggtctgttattttgtgaaagccttttcacatgctagaggaacaaaatagaaactcttcacctgtcgggactgctctagccattgctggtgatgttgaaggtttggaagggtgactcccttgacttcatggaaggccttccaagggtgcacgagaagtgtgatcctcacagtcaccgaccatttttctaagtatgcacatttcattgccctcgttcaccacctatagattgtggcatcggttgtgaaggcgtcattcgatggtttttatggcttttctagcatccattgtaagcgaccaggaccccgtgaaaggtaacttttggctggacctcttcaagatggctggtgtgagcttcgtataagcatagctttccatctacaaactttttttttcctcgaacagcgcaggagaactgcgcgtcatttcatttaaggaagaaagtaagtacaaaggtcaagagtgacccgaaacacaaacaccaacacacacacgccatccctcaaatacaaccgtcgcgccacatcaatgaagaaggcgaccacaacctacagggctaaaaaagcaccagtaggcaccgacccaaaaacaagttcctggagtttggaagctccagccaaacaccacagccccccttccacattaacagcttttagcacttcctcaacacatggcctagaattgtcaaagacacacctgctgcggtgcttccaaatctcccaagccactaacataattagtgaattgaggcctctacgaagccccttaggaacagcagcaacagttctcttccaccaacctgggaaccgagacactagaggtggtgaatagaactattgcaatgtacttgcagtgcatcacgggagataggtcgtgcacatggctggaatgactgccatgggaagagtattgatacaatacatccttccaaatcacgctcgaagataggcgccactgcccttggtcccattcacagtgcgcaccacgcgaactcaagcagtgcagatggcgctttaggagcgtgaccggtttttggcagagctctatgaatgactggttcaagcccaatatcacgggaaacgctaatacaataagcaccatcgcaaactagagttcgagatcggctcttgggtgtggccatgaacaggttgctgaaaagtgtctctgataccaaagatgatttgtctggattgttggctttattgatacaatgacaaggaaatcatcctgaccgccctccctaggaggctctggtcataataactcacttcttgctaaacccgtaatcaacattaggtttacagataaataggcttagaggttagctgttagagaaaggtatatgctgttgcaaaagatgatgtcttgcattgagctcttagatgatttatacagagtacatggcgtaggaggtaagacaacccatggatacatatggcagtctatgaagtataatatctagactatcaaatatactctaacacatgtggcagtctactagacaatatctagactaccaaatatactctaacactaaccactcccctagaatttctcttttttcctattgttcctcctagacttccaactaagctccatgcagacaactacggaaaaactcaacaaacttgacaactaattaggcgtggctgttagccacatggtgttgtggacgctggcttgttcttcttgtggcgagtatagacttgctgataagcgtccacaacaggttgttcgtgactgctggtgtgttaactctactatgaaaatatctatgtgcagtatgaagaagctaagctatttggttcagaactgaacctgtattcagtcttagcaactctactcatcaccctcctctagttgcaacccaatagagtatttctgatatgtctttcatatcatatgcattttgtacaagcagattagattatgtccaagttgtgtattgtaatgattttaatgtaagtttgtcttgtaatatagtctttaggaattgttccttgtggtattatttattatctgtttcttcttgtcttttgtttgtttatcttttattccaagttggggtgttcccatcttgtttccttgaaaagattgtactgttctcatgtaatgcttctttcaggagattcctattgctgatgtttgtgagacatttaaggtcgccagaggtatgattcaggcactgcaggaaaatgctggcaggtttgcttcaatggtttctgcattttgtcaaaggcttggttggaatgatttagaaggccttgtttcgaaattccaaaatcgtgtctcttttggagttagggcagagattgcagaactgacatcaattccatttgtcaaggtgtgctttaattaccatgcatatatgaattatctaagtgtctctggatcttatttcagtatggtcatgtaaaatatgaaatagggttcacgtgcaagggctttgtacaagtctggtctgcgtactcctgttgccattgctgaagcatctattcctgaaattgcaaaagctctttttgaatcttctgcttggtctgggcaaggtactctttcacgtattcatggtctgattccttactactcttttttatagtacttgttttgatgaggatataaatactatagctgaaatcctgtcctgtacagtcaaggattttccttgtacttatcttgggctacctctcacaattggcaaacccacaaaggaggtcttgctgccataattgaaaaggtggcagaatttttgctgggatggaaggcttctttaatgaactgtgcaggcagattggtaatggttcgagtagtgttaactgctgctcctatttaccttttgattgccatggatctaccaaagtgggttctaaaagccatcgacaaaaggaggggtctcctctggaagggccaggaacaagctaagggaggtcactgtttggtctcttgggaaagggtgcaacagcctctggaatatggtggtcttggaattcataatctggatctgcttggctgcgcgttgcagattcgctggttgtgggctgagaaaactgatcctagtaggctttgggcaggcctccccgctcaagtccctcgcaatgcttaggccctcttcaacattgcagtggacatcattgttgggaacggtgagcaaacactcttctggacagacagatggctggatggccataccatatctgaagtggcacccagcttatttagtgctgtctcgaagcggacagccaagaggaggacggtagcccaagctctccaaaaccaaaggtgggtggatgacatcaaaggagcactcacagtccaggttatattcgagtatctaaagattgtcgcatggtggatggtctgtttttgcagcaagatgtgccggaccaattttgtgtggaaattaacacaatccgacatttacacagcatatagtgcttatttcattggcaccatcaaatttgggccatggagaagaatatggaacagttgggcacctcctcgctgtaagtttttcatttggctggtgttccataaccggtgttggacggttgatcgccttgctaagagaggcttgccccaccctgatgcgtgccagctctgtgatcaagatgatgaagacattcaccatctcttggcctgctgtgtttttgctagacaagtatgagcaagcatctttcttcagtcgggccatactgccttggcgccatatgcttcaacaatctgtttttcaaaatggtggtggacagtaatctcaactgttcctaagaaaatgcggaagggtctaaattctttgatcattttggtcgcttgggaactgtggaatcattgtaatgcttgcttgtttgagcaacataggcccaatgttcaggaagttcttagggctgttagggatgaaggtagtctctagtgcagcgctggagcaaaaaagctccaagagctaatggtcacggtgttcagtctgggggattaggagcttgttgaggttcctttccctggccgcctttcttttttctcttctgtttgggttttagcgtctccagggtgggaggcgtgatgtacagtgggtgtgggtgaggtgttcttgtatttatttttggcattcctgcctttcttctaccttaatgaaatgttgcgcagctctcttgcgttgttcgagaaaagaaaagatgcacaaattggtttctcagttacttctggatatattcagtaataagcttgcagatactttattgtttgttttaagcctactctaatgtcaatctgttgaattgactaggtgattctggtttacgacgaatgcaatttggtgtagcaaaaaaaataaaaaatggagcccgcaaaattgtcctggaggaggcagaagccgccagagtagcagcattctcagctttcaagtcacttggtgtggaagttccccagttcactgcacctccactcgcagctattgaggaatatccaactcacgataccatagaccaagctaagttaaataagctagcttctggtacccattctagagatgataaaaatatgaatacttgctctgattatgctactccaagggcttctacatacagtctaagaaaggacacaagtcctgctccttccattcaaatgaaagagaatgcaggactatctaaaaatgtgcaaatcactagacagggagcatcatcatctttgtcaacagaaattgctgatggatctagtagagatgtggctgaaaaaggtcctgtccatgcatataacttcccagggggatttgattgttttcttgatcaatggtccacagctagtaattttttctttgatgttcattttatcaagagatcgatgaaaccatctttgaacctttttgaagtttttgggttggctgtctgttgggaaaaatctcccatatactactgcaacttcccaaaagatctagtcactactggcaacaataacatcaaggaaatgtggggtaattttcagagaagatgggaaaaaatagcggacattatgaaacaaaagagtgtccaaaaaatgacatggaatttaaagatccagatccaggcacttaaatcaccttatatttcttgccaacggcttgaaaggtttcatcttgaccataaaatgctggacaaagttgaagtgcttaacaactcatatatgttgttatcaccagtctctgtctacaatggattggatatatgtctgctggcgtgggttctatggccagatgaggaaagcagagcggttccaaatcttgagaaggtatttgatatatgtcgtgttctgcaatatctttagcttttcgttgctgatgcattgtcacttcatgtacattttttatattcgtttttttctgaactttgcaaaagcaatatgagtaggaattttagttgataagagcctcaagaaccgtgtgttggatatgaaaatgcaaggaaataggattattcatatagggcatgatgagaatgctaagagactttttaggaagacttagatgtcatgtttacaactatacctatcagtaagaaacttttcataggagatctcaatgggcatgtaagtacaacaagtgtaggttttgaggtgtttcatagaggcttccccaagcttcacgtctcagacaatgtttcttgaccaagtgggtttggctatgacatgaagctaagaaacattgtctggtcatgtccactttggagcgtaccgctcgtttacgctctcgaatctgcttccttaaagatggtgataccaattccatagctatgttttctggtcgcccgaccagctagtcgaactgggggatcgaccagcgactaatctcgattagtcgtcgactaggtccgactaatcgagctctggtcgacctggtcgtcctgttcatccaggagaccaggacctatgtatatactatataatatatactattatactatatagtaaataattatataactatatagtatatatgaacttcatatactatattatgaaggatagggtaaacatgacatgaattcagcaatactgaaaagtgaaaacagcatagaaacacttctagttattaatactacaagtcccagataccagtaccacacaacacacattaatactacaagtccaaaaaaaaatctaggtcctaaacctagtcgcccagaaccggctaatcgagcgactaatcggccctaatcgtcgactagtcggacgaccagggcgaccaggtactctagtcgagtcgactgcctaatcgagctctgctaaccgactagcccgactaatcgcgactaatcgcgattagtcggacgacttgaaaacacagttccataggcatgccagtttccggaaacaaaagaactttattgggaagttggtggttgatgatcagattttcacctcgcaagatgagaaacagaagcttgatggtatcttaattgcggatgcaagaggagacttatctttcagttatatcttttggtcgaacaatgtgcttgacaagtggagtatagtggtactaatctacacgagtaagggaaatatttaaagttgtatcaattaccaagtaattaagttgatgaaccatactatgaagctatgtgagagagttatcgagcattgtttgagaggaataatgaggatctctatgaaccaatttggtttcatgtccgaaaggtcaaccatggaagttattttcttaataagacaagggatgaagcagacagggagcagaaggacctacacatggttttgttgacttggagaagacttatgacaatatactaagaaatgtcatgtgttggtttttggacaaacataaaatctcaaggaagtatgttgtagtcattaaagacatgtgttcgaacaagggatggagacacaaataacttttcgattagaatatgactacatcaagggctggctttgagcccttatctttttgccttggcgatggatgaggtcacaagagacatacaaggggataccccttggtgtatggtttttgcgcacaatgtaatgctagttgatgaaagccgagcaagagtaaatagaaaactagagttgtgatggaagactctagagtctaaaggtttagactcaatagaacttaaactagagtatatgagatatgacttcgacactactgcacatgactacatacggaaagagatcttagtttggaagtttaagtagtgcttaggaaggatatcttttagtatttagaatcaatgctatagaatgacagggtattgatgaaaatgttagccatagaatcaaagtagggtggatgaagtagtgtcaaccatatgatgttctatgtgacaagagtgtaccacagatgctaaaagacaagttttaccaaacgatgattatacctgctatgtagtatggtgtagaatgttggcctataaaaacacattttcaatagacaagaagggattgagttcgaatcatggaatggtgatacacatgataagctaggggtagcaccaattgaagaaaatcttgtctaacacctgttgagatggtttgtaccatggtttttaaagcggtaaggcgctccaaggcgttggaccaccgcctagacgcctaggcggcgcctaggcgacgcctaggcgaggtaggcgggcaaggcgcctaggcgtcagaccaccgcccggacgcctaggcgtcgcctaggcgacgcctaggcgacgccttaaaaacagtggtttgtacatgtccaacagagaactccattagcaccattgtgtagtgacgcgctaataatgggaagagagatggagaaaggctaaagttaatatggaaagaggcattaaaaggagtcaaagatttagtcttgaataagagtgcatggaaaatagctatccatgtgcctgaaacttgacttatggtttatgttgggtttcaacgctagcctatcctaacttgtttgggattaaaaggatttgttgtttcttgaatacgcaggaggtctgcgtatttttatattaagaagaaaaaaggggggggggaccccaaaacagaaacaacagttttacaaactcacaccaccattaacgcctaagacaactcctctaaaaggatttgttgttgtttgcaatagcaatacacagctgttaattttgatgctgacctatttctgataatatattacttttgcattttactttgtgataaacagtttgtcaagaggcgacttcatagtcaagaagccgctgctgcaaatcgcgatggaagatggagaaatcagatgcacaaagcagcacacaatggctgctgtagacgtgctgcacagacacgggctttgtatactgttctgaagaaattacttactcaaaatctttctgttttggttgaaacaatcgaggccccattggtacaacacctattcttacttaatactctctccagttataacaaaagtgtcattttgggttgcctgcagttaatttgtttatactttgatgctttggattgaatatctgaaaataacgcaactagattcttcctggaaagtagttcaaaatataacaactttgttatagtttcatacattttgtagcaatcgaatcatcctattagtacccatgttggtatccaaaattacacttgtgatcggaatacaatattgctgcttgtattatgcttggatatctcttatgcatttattttgacaggttaatgttcttgctgatatggagctttggggaattggcgctgacatggatgcttgtctccgtgcgaggcatattataacaaaaaagctgaaggaactagagaaagaagcttacagattggcaggcaagaatttctctctaaatgctactgctgatatcgcagacattctatatacacacctaaaattgccagttccaaaaggctgtgagaaagggaagctgcatcctagcactgacaagcagtctttggaccacctaaggtattttttcattttccttgttagttctgacatcaaacatgttatttctagttctttggaagtacttgtgtgccactttatgtccgtgcattatggatggaaaattttaaatgtgttagcatatctagtgtctagtcactgatggtctattggtagttttgtgtgagtaaaggtaaattattatgttgtcttgatcagagctagaaaagtgcttgtggaccaccggccacatgttattggcagttaatctctggacatgcttttagaatatcattgtgctaatatgcactctttttctgttttttttggagtcaattaacaggattaactcatttttcatccctaattaaatacacgcatgcatgttcaaataatatcttcaatttggaaaagcttatgccaaagagaagcacatgtatcactgctttactgtattttcagtatataggctgctgctgatgtccttattgtatgcactcggaagatcggtagcaaggcaacactacaacagccttgccaagctggtcttcctttcgtttgaaatctatggcactcttttgatttcacttggccccaaattttcctcgacataaaattgccgtggctttatagtttactataaaatccttatcaactggacataatgctctctttaggcttctattaattatcccagtaatgtaggagaatttaatttgaccattttgctaaaatatttttgaattcttctgtttcctcagggatcaacaccccattatcccattaattaaggaacacagaacattagcaaaactgttaaatggcacgttgtggtccatttgttcacgtgctcaattgtgcactcaatcacaaaggtacatcatacatggaaattggcttcagacgtcaactgccactggccgtttgtccatggaggagccaaatctgcaggtcctttagttgtaataaatgctttgcatgttttgtttggatttcagttattgagaaataacctactgacttaacctgttactatgtagtgtgttgagcatgtggtggaattcgatacagggaaaagcgataaagattactcaagcatgtcagttgatgatcatcataaaatcaatgcccgtgattttttcatacctaccaaggtttttctcatttcacttttatgtatttattaagttttccctttaattaggacagttgactattttcctgtaacaacgctttatttaatatcatgatttacttattttgtaggagaactggttattcataactgctgattactcacagattgagttgcgtttaatggctcacttttctaaagatcatatgttggttgaacttctaaagaaacctgatggtgacgtttttaccatgattgcttcaagatgggctgagaaagaagaggccttgatttcttccaaagagagagaaaacactaaaagattcatatatggcatcctttatggaatgggtgcaaactcccttgcagaacaacttcagtgcagcactgaggaagctgcacagaaaattcaaagctttaggagattttttcctggtgtttcctcatggttacatgaagttgtgttatcctgtcgccaaaaagggttagtctacttggtagcaatttctgtttagtctttctttttatataatattgctcctttgatttttgatgctaacattgaatgagctctgtgaaaaatatgttagtcttaacttttgtggtatttcatatctgaacttttgagatatttcatatttgagcatgtattatcatatctttcaatgttagtatgcgagctgcttctcataataatttaaggtgaatatgcttcatgataatttgattttatttgaatgttaagtttatacagtaaatgataaggattactgtcttttggtcatgttatttatataacgactacttaagatcagagctcctttatctgttgggttgacatatgcacttgtagcccatattgctcatgagattgtatatatattgtcgtatccactactagcggtcttacgaaaccccaaggttactaaagccatggattagagtttgggataactttcaaatgcactcatgattcaattttctttttacctggtttgtgccgatcagaattaatgtctgcgcccttcttcagtttgttgtggcctaacttgtgaaacccttgctatctcacaacttccatctgttagacaatttattttcttccctagttacgaggatttcttctctgattatgtgccagcagttgtttcctccgtacgtagctgtccttgattaggtgtggacaattggttccttcctccctggctgtttccttttagcgcccagatcatctccccgattattgtttccatgaaatcaggtggagcacgttctggtagaggcctattgttctcctgctatttagttgaatataagcaacatttcgcgctattatggcatcaagagattgttacgatcccgtgagaactcgcttttggtaatacttgcttgcccacgtcgcctccccgatgttgtgccgtcatgccacctagtgaccctctgcccgttttccggtgaccaacaacataccgaggatgcagccacataggagaaggcctgctagatccttatcgttgctgccgatgaggctgtcaaggccgtcactgccgcctaggatcatggccgcacaacccaggacgctctcgcgagggaacgctaggctgctaccggtctcaagcgtgctaaggccgctgctcgtgacgctgccttccctcctctcaacgacgaccctgatgatgacgccgacgctagtgaagacttcaattatgaggccgctaccgcctccaacctccacgtggaggccgtgggcgtacagaacctccatgcccttgtgcctgtggttctggacatcctctccacccactacagtcgctgcgggatctcgtcctcctcgccctcgagcggtatgccgtcgccgaccatgtcctcttcgacgccctatttgtgccatcctatcgacgcatggacatcgtcgtcttgtcatgggtgttgtgcacgctctccctgagtttgagttcgctcgcacccccggcggcacaacacaccacacctggatcgttgttgaggagcaattcctcggtaatcgtgaagctcgcgcccttcatcttgacgccaaattctatgtctttatgcatggtgacctctctgtcggtgactactgccacaagataaatgggatggctgacgctctcggtgatctcggagtggttgttcgtggccgcatcctcattctcaacgtgctacacagcttgaacgagaaattaaaccacatgaaggtccactttcatgcactccaagctgctaccttccttcgtctgcaacgacctcatcctcgaggagattgactacaacgcatcaacaccgccaccagcagccgcccttgttgctgtgcatggcctttcggtagctctgcttcccctagcgtcccctcttctgggggcttagctgcgcccctgtcccacccacggcgccctccggtagcatctccactggtgccgacagctattagtagctaccgtcgtcgttgcgacaacggtggcgttgaaggcaaggccatggttccctagcctttgatctacaactcgtggaccgagttagtcaccatgtggcctggccccacatgtgggccacaagaccgtggtggccaaacgccgcgcgcgcccatgcctcaggccacgcaacaacagttgacaacaacatgactagttcgtggtcatgtcgtttggcttgaggaatgcgttaacatcattctagtcccccttgagaattgaatagcactcctagctgacaccatggactcatcgcactcttcatgggttgcttggcctcacgggcttctaccgcttcttcatcaacaactacgacatcatcaccacaccatgaacatccctcaagcgtgttgccttccagtgtgctgatgtggcgactacatcctttgaggccttcaaggcggccctcacctatggactggtgctgcagttgttgagcatcacggcttcgtccatcatcgattgcgattcttcgggcattggttttggcgtgctcttgcccgatcgccttgtttagtctgtggatggagccccagcctaccaaacttgccacctaagagcgcgagctcattggccttgtgaaggctgtgcggcactagaggtcgtatgtctgggaccggccagtggagatagaagattgggtccctaatgatttctcccctactagaatactgcaacagaacctttgaatcttttagtcctgaacaagttgtgcaggctagtttcgaaatgcaacaagggaccacaatatcgatgatacagctaggcatacatcaaagaagtttctaattcgttatcactcctcagatttgttgagactttattaggccggcgacgtgttcttacaaaaataacggctggcaatagcaaagagaaagctaaagcacagaggcaagcagtaaattctatttgccaggtaatatagcattctcacatagttttagatggttgattttattgattatatgattaatatgcatgtgtttccagggttctgctgctgatattattaaggtggctatggttagagttcattcaataattactaacagaactagtgcaactgattccacagatgaagttacaaggaaattttcagaacttggtggccagtgtcaccttattttgcaggtgttttaagacttgcattgcatgatacttattttcttttgacttttgctcagtttggctctaaatatggatgaatgcaactatatatttttcatttgtaggtgcatgatgagttggtattagaagttgatccgtgcatggtagcacaggctggaaggttgttacagatatgtatggaagaagcagcttcactattgggtatcagttttaatctaaacttcgatagttatcttatgttcagtctttgggagcatcttgaaaaggtctttaaaatttacctgctaaactaatagttatgccaagtgaacaaaatgaataggaagttctatttctgccgttctccaatagttaggttcttaaaactaacaacctgggcaggagggtatggggggagcacgcaaaaactgcggaggaggaggcacaaatagtagatatgacnnnnnnnnnnnnnnnnnnnnnnnnnnnnnnnnnnnnnnnnnnnnnnnnnnnnnnnnnnnnnnnnnnnnnnnnnnnnnnnnnnnnnnnnnnnnnnnnnnnnnnnnnnnnnnnnnnnnnnnnnnnnnnnnnnnnnnnnnnnnnnnnnnnnnnnnnnnnnnnnnnnnnnnnnnnnnnnnnnnnnnnnnnnnnnnnnnnnnnnnnnnnnnnnnnnnnnnnnnnnnnnnnnnnnnnnnnnnnnnnnnnnnnnnnnnnnnnnnnnnnnnnnnnnnnnnnnnnnnnnnnnnnnnnnnnnnnnnnnnnnnnnnnnnnnnnnnnnnnnnnnnnnnnnnnnnnnnnnnnnnnnnnnnnnnnnnnnnnnnnnnnnnnnnnnnnnnnnnnnnnnnnnnnnnnnnnnnnnnnnnnnnnnnnnnnnnnnnnnnnnnnnnnnnnnnnnnnnnnnnnnnnnnncccccccccccccccaaaaaaaaaccaaaaaaagggagctgttctaagaagcccatggagatgctctaaccaaggtaaaactgaattggtgtttgcttttatttcagtacctttgcgcacaaagataaaggtgggaaaaacttggggttcactagaaccattctatcctgagccttgttgatgcaaatggttaatgtcagttggatgccaatgtttcacgacatgcaaggtcctggaagaaggctgaacaatttccaatatgccccacagggaccttggtaaatcctactcttttttatagaagattcaccccctgcagagttaatctcatgaggcctgctatttgccactatcgtttcttgttctgcattgtccatgtatttaactgatgcataccttgaaccatatatgaccatatatccgtgtgtggctttgctaatcttgtattttgaatttagtttacattttcatcttcacggtctctttgaaacttcaaatgaatcaggtgattctgtctggtgttcttcggtagaaccttcattgctatgtctacagtcttctgtcattgctgaccgtatgtgaaatcaacgcaacagcgaccagctccattactgaggatttgctatggactggtgattatcattatgattccatgtggcatgcaagaagcatatatatatatatcaccaatagatgctgttaaagggtttaaggtgtatttgaaaggtcttcctagttatactgcgaatcttttagataaacccttaagaaattggagggcctagtatatggtgatttttcttttgctaggtccagcgctaaaaaaccgattatggggtttattcaaagatgaaatttcatcctgtaactacaggttcaaggtgtatttggtttgatggatatcactatggacaagcgatggttggtttttgtacaagttggatgttgataaaaatgttggtatccatgccacacaaaaaaagcctaaccagcacccatattttgtaatccttgtcaagtatgttatatggtttacttgatagctctagcgaggctatccagtacctcaccttcaccctcatatttgtaatccttgtccacataattattagtatgttatatggttatttagtaattacgatggaaatatta

SEQ ID NO: 29 - DNA, 156 bp, Artificial Sequence
  marker ma61227s05
caataactgttattttgcaagttacgggtctaattttgttgttccagtgctatcctgcctttgaggggtgactgtgattacagcgagyagtgccagatgaagcagaagcggagtgcgtcccagtcattcttggttccttgtgacaacgactatgtc

SEQ ID NO: 30 - DNA, 72885 bp, Artificial Sequence
  genomic DNA of mutant pol theta (c->t at position 630)
  misc_feature (5583)..(5733): n is a, c, g, or t
  misc_feature (31155)..(31650): n is a, c, g, or t
  misc_feature (44470)..(44479): n is a, c, g, or t
  misc_feature (45143)..(45152): n is a, c, g, or t
  misc_feature (46993)..(47109): n is a, c, g, or t
  misc_feature (53299)..(53398): n is a, c, g, or t
  misc_feature (71287)..(71733): n is a, c, g, or t
gcccagcaattcaaaagaaaccgaacacccttccggaaattccctctggcaatggcgtcgggctcgtctcgcccccaaatcgaccaggtaaaaccctaacctagttcctcgcctattcacttcgtcgcctccaagcgctaattcttcctgcgttccggctccatctcagttcttcccggccaagaagcggaggccctcgtcgcggaagggcgagtcgccgcgacccgggacgcagcatgagagccccggcggcgccaaggggtccctggaagggtacctcgtccgttcgccttgcaaccgtgccgtggcagcggcatcggtggtccccgtgggctcgcccaggggcggggacccgggcgccaggcgtagcctctcggccgcaatggatgtcgacgtcggttcctcggcttcggtggctgcggcggcaggtgacggggcagactttgatctcaggaggagcacggcggatttcttgtcccattcctgcaggtgagcgcgcacagtgtgaaacataaggggagttatagtattggttccaataactgttattttgcaagttacgggtctaattttgttgttccagtgctatcctgcctttgaggggtgactgtgattacagcgagcagtgctagatgaagcagaagcggagtgcgtcccagtcattcttggttccttgtgacaacgactatgtcaagaagcagcgagttgcccattgtggtggctttgaagctctaaaggttggatcaagatacactatccatccatctttagcatcgtcatatgataagtgatttcatgagtttcaactcttagtttggttctttgcaggagttagatgataatgtagcttccatgaagcaatgcatcaatcaccatggtggctcagaggctgtggaggtttagttatgcctgaacaagtcaaacctggaaccgtttctttgttttcctcttttccttttgaacttctcattatttccttttcatcaggaatctgttgagggggaacatgtgagttgtgttgggttttcggccttgcaaagatgtagctttaccccaagtactgcacagataaaagttgggttttctctagcacctgtggaaaccctaaagtctgtatcgaggaattcccttacttcacctggtgaggagttctggaatgcagcaattgaactcgctgatgggatatctgcccaggctgataaggtccgtggaaggccagaatttgatgcagcagaagacaagtcatcttgtgcagtagcagcattctttaagactcttcctagatcaggaagggatgagcttgactgtcaaaacacagtaggcagcaatgatacacatcatatagagaaattgtcaaataaagttgaatcactggcagtaaactgtcagcatataattagctcacctttgcctgtgaagcagctagatttctttcatgaggatgatattaaagtttcaggttcaaaatttgaaacaaaaggcagctatgaaacttgtaatgcacaagcagaccgtgttccactgaaaggcagtggccgcctagaaaaggaaaatctcatggaccctgtggatgtgatgaagagaagtgctattaatttgcacactgattctgcagccatgagatgtcagggtgttttcaagtcaacaactgaagggaaggttcatccaactcaagaggctggaagagattctaatcttattaggagagatctcaatcagccaacccacaatgaaaataaatcacttgctgcatattcaaataatcgcaagacttggatagattccaagagtaaagttgcttctcaggaagtggaagctagcacacctactagctccattcctctaaaggatcactcaaagatatcaagttggcttcctcctgacctttgtgctatatacatgaaaaaaggcatttcagagctgtacccttggcaggttaaggttcttttctctaattatctatttaatgaatctctggcagctagccttctttcgtctggccatttttgcctatgtatttttttctccagccatgcaaactaccactgccctctctactagtaggattaccaattatttttgctcgtaagctaagcttctttagtatttgtatcgtaataagtatgtcttgaaaactagtacttagtatatcaagtgctgagatggtttgtacatgtccaatagagaccttttagaggcaccagtgcatattagtattataaaacattaaaacgtgatagtaatgggaagaggtagggaaaggccaaacttgatatggaaagatgcaataaaaggagacttaaaatgatgaaatatatctaaagatttagtcttcaatatgattatgagtgcatggaaaacaactattcacgtgcctaaccttgatttgtggcttgtgttgggtttcaactctagtctacactcacttgcttggtactaaaaggctttgttgttattgttgattcatataaaatgctaagtcttctcttgtattgctgtcatcacattcttttcacgtttttaatgcgtttttgcttcatttttctcgaatattgtaatgctctcctagatctgtctgaaggcatgtttggtttgtgcccccactatgctaaaccaaatttggcaatagaagaaaccatgacatggccttttgtaacaccccgtccaatccctggaccggcggtacttactcctggtagctctctagaatcatatattgtccccacagaccaacacaagtcttttatgcgcactttgtcctcactcatgcgcacccgagaaaacttcccagtcggtcacccatcccaaattgctccaagccaagcacgcttaacttggaggttcttttgagataggcttcctaaaaagaagatgcaccttgttgatatggttactctattaattctattaagccttgggccaggatatcccatcccaggggccaggatatcacaattcaccccccttagaagaccgatgtcctcgtcggtcaaccccaatccaggaacctcccctcttagccacgtctgtgtgtctagtgtcgtcatatgccatgccatgtgaccactctgggcccacatgcgccatgcgccatatacccaaaccacctagcccacacacgcccgtgaaacatcgagggtcggctctgataccacttgtaacaccccgtccaatccttagaccggcggtacttactcctggtagctctctagaatcatatattgtccccacagaccaacacaagtcttttatgcgcactttgtcctcactcatgcgcacccgagaaaacttcccagtcggtcacccatcccaaattgctccaagccaaacacgcttaacttggaggttctttcgagatagacttcctaaaaagaagatacaccttgttgatatggttactctattaattctattaagccttgggccaggatatcccatcccaggggccaggatatcacacctttaggcaggtacaagatttgaattggattattggagccaaataaatttacataaatatctacctaactaaaaggaacaatgtttcttgttgccccttccacccaatgataggtggacccaaggtaatcctgcgtctcttatgtcaggtcagcactctctcgctaagagccatttgttcatgattgaatagccaagtgagatggccaccatcctcgaggtcatgttttcggacctaggatgtcaggccgaatgtgttctggttcttggagttgtattttgtttcttttaatataagccgttcggttgcataggccaaaagagcagtttgaggccaaatgaaattttagcggcgagagctgtctcactgagttgtgagtttgaagcagtctttccgcatttgcgcggggggggggtgatggaataagtcttgagcatctagaggacagcctgcttttgactgtcctctgtagtcctttagcatctagaggacaacagtcgctttttgactgtcctctgtagtctctttagcatctagaggacaacaatcgcttttgactgtcctctgtagtcgctttagcatctagaggacagcagtcgctttttgactgtcctctgtagtctctttagcatctagaggacaatcctgttgtgtagtgtgtgtgagaaggtgtggtagtgcagcccctagggctataaatatgtgtccccaacctctctaagggtatgacattgtgtagtgtttgaggaaataaacagaaaattgccccaactcatagtgtcatcctcttgatgagagttagagtccctctacttacaattggtatcagagccaaactatcctgcagcctaaacatatcgtgctcatctccttctcgcgtctctccccacactcagtcggcagcaagagctccaactgttccttcctcccctgctcagacgagcagcctttcgtctgagacagcctcttccacacgcagcaacccctcactagcccaccatgtccctacgctcggccacttcgagtgcgcggcgccagcaggaggccgaggtcgccgcggcacaagaacgcgagcgagcagcagcagcggctgcagcgacagcggcgagggcagcacggttggcggcggcggaactggcagcggcgagagcggaagtagaagcagcggaggcggcggatgctgcacgtgcggcggcaacagagctcgaggttctgcgcggcagtagagctggcagctctgcttctgtcgacgacaacaccgacgaagagctcaggctggcgagggaagcagcgcgagagcaggcggcatagtgggcagccgcgcatccccatgggggcgcgcgtggcggcagcccggatacgcgctgacggcgctctaggcggaggcgcacgcggcggcagcccagacgggcgtagacgcgccggcggtgctcccggcggcggcgaccgagtcgacggagatcgcggcctctacaggcggcgcggttctccctccccggatcggtaccatggtcgccgcatggcccaggccattgtcagggacatcggtcccggcggtggggggcctaccctcaccaagaccaactacgtcgagtgggccgcggtgatgagggtacggctccaggttcgccacatgtgggaagcagttcgttacgacgacgtcgactaccacgaggatcggcgggcgctggatgctctcattgctgtagtcccgcccgagatgcagttttcgctttcccagaagcggactgccaaggaggcctgggacgccatcgctgcgacccgcatcggcagcgatcgtgcccgcaagaccacactgcaggcacttcgcaaggagtgggagaacctggccttcaagccaggtgaggatgttgatgactttgctctccgcctcaacactctgttgcagaagatggtgcagttcggcgacgacacctacgatgaggagagagctgttgagaagctcttccgttgcatccccgagaagtacaggcagattgctcgctcgatcgagtctctgctagacctctccacgatgacgatcgaagaggcgattggtcgcctcaaggtggtggatggcgacgaaccacaggctctctctgggcctatcactatcggcgggnnnnnnnnnnnnnnnnnnnnnnnnnnnnnnnnnnnnnnnnnnnnnnnnnnnnnnnnnnnnnnnnnnnnnnnnnnnnnnnnnnnnnnnnnnnnnnnnnnnnnnnnnnnnnnnnnnnnnnnnnnnnnnnnnnnnnnnnnnnnnnnnnnnnnnncagggtgacaagaagaagggggagtcctcctcctcgacacgaggccgcaaacgcggcaagccgcgcaagccgcgtggaggcgcccaggccggggcgcgaggacatgctgagggtggtgcacgtggaggtgcccaaggcggcgccgtcggcaacaagaagccggcacgcgacgacggctgccacaactgcggcaagcttggccactgggccagggattgtcggcagccacgacgtggccaggccaacgtcgcacaagcagaggcggaggaggaggccctgctcctggcacatgcaagcatcgagccatctccagcggcaccggccgcagcggcactcctccaccttgatgagtcgaaagcacgcgctttcctcggcgacggctccaacaaggacatgatcgaaggatggtgcctcgacaccggcgccactcatcacatgaccggccgacgggagttcttcaccgagcttgactctagcgtccgaggctccgtcaagtttggggacgcctccggtgtagagatcaagggcgccggctcagtcgtcttcaccgccacgtctggtgagcacaggctgctcaccggagtctactacatccccgcgttgagaaactctatcatcagtttgggacagctggatgagaacggttcgcgcgtggaggtcgagcacggagtcatgaggatctgggatccctctcgtcgccttcttgccaaggtacgcaggagtgcaaatcggctttacatcctcaatgtgaaggtggcacaaccttgctgccttgctgctcgtcgagacgacggggcatggcagtggcacgagcgcttcgggcaccttaacttcgaagccttgaagcggctcagcgccaaggagatggtacgaggcctgccgtgccttgaccatgtggagcaattctgcgatgtctgcgtgttgacaaagtagagactgctccccttcccccagcagtcgagcttccgagccaaggagaggctcgagctcgtgcatggggacttgtgtggcccggtgacaccagccacaccaggaggacgacgctacttcttgctgctcgtcgacgatctctcccgctacatgtgggtgatgatccttggcagaaagggagaggctgcgaacgccatcaggcgtgtgcaggtcgctgcggaggcggagtgcggccgcaagctgtgatggaataagtcttgagcatctagaggacagcctgcttttgactgtcctctgtagtcctttagcatctagaggacagcttgactgtcctctgtagtctctttagcatctagaggacagcagtcgctttttgactgtcctctgtagtcgctttagcatctagaggacagcagtcgcttttgactgtcctctgtagtctctttagcatctagaggacaatcctgttgtatagtgtgtgtgagaaggtgtggtagtgcagcccctagggctataaatatgtgtccccaacccctctaagggtatggcattgtgtagtgtttgaggaaataaacagaaaattgccccaactcatagtgtcatcctcttgatgagagttagagtccctctacttacaattggtatcagagccaaactatcctgcagcctaaacatctcgtgttcatctccttcccgcgcctctccccacactcagtcggcagcaagagctccaactgttcctccctcccctgctcagacgagcagcctttcgtctgagacagcctcttccacacgcagcgacccctcactagcccgccatgtccctacgctcggccacttcgagtgcgcggcgccagcaggaggccgaggtcgccgcggcacaagaacgcgagcgagcagcagcagcggctgcagcgacagcgacgagggcagcacggttggcggcggcggaactggcagcggcgagagcggaagtagaagcagcggaggcggcggatgctgcacgtgcggcggcaacagagctcgaggttctgcgcggcagtagagctggcagctctgcttctgtcgacgacaacaccgacgacgagctcaggctggcgagggaagcagcgcgagagcaggcggcacagtgggcagccgcgcatccccatgggggcgcgcgtggcggcagcccggataggcgccgacacgctgacggcgctccaggcgggggcgcacgcggcggcagcccagacgggcgtagacgcgccgacggtgctcccggcggcggcgaccgagtcgacggagatcgcggcctctacaggcggcgcggttctccctccccggatcggtaccatggtcgtcgcatggcccaagccattgtcagggacatcggtcccgacggtgggtggcctaccctcaccaagaccaactacgtcgagtgggccgcggtgatgagggtacggctccaggttcgccacatgtgggaagcagttcgttacgacgacgtcgactaccacgaggatcggcgggcgctggatgctctcattgctgcagtcccgcccgagatgcagttttcgctttcccagaagcggactgccaaggaggcctgggacgccatcgctgcgacccgcatcggcagcgatcgtgcccgcaagaccacactgcaggcacttcgcaaggagtgggagaacctggctttcatgccaggtgaggatgttgatgactttgctctccgcctcaacactctgttgcagaagatggtgcagttcggcgacgacacctacgatgaggagagagctgttgagaagctcttccgttgcatccccgagaagtacaggcagattgctcgctcgatcgagtctctgctagacctctccacgatgacgatcgaagaggcgattggtcgcctcaaggtggtcgacggcgacgaaccacaggctctctctgggcctatcactatcggcgggaagctacatctcactcgggagcagtgggaggcctgccagggtgacaagaaggagtcctcctcgacacgaggccgcaaacgcggcaagccgcgcaaggcgcgtggaggcgcccaggccggggcgcgaggacatgctgagggtggtgcacgtggaggtgcccaaggcggcgccgtcggcaacaagaagccgacacgagacgacggctgccacaactgcggcaagcttggccactgggccagggattgtcggcagccacgacgtggccaggccaacgacgcacaggcggaggcggaggaggaggccctgctcctggcacatgcaagcatcgagccatctccagcggcaccggccgcagcggcactcctccaccttgatgagtcgaaagcacgcgctttcctcggcgacggctccaacaaggacatgatcgaaggatggtgcctcgacaccggcgccactcatcacatgaccggccgacgggagttcttcaccgagcttgactctagcgtccgaggctccgtcaagtttggggacgcctccggtgtagagatcaagggcgccggctcagtcgtcttcaccgccacgtctggtgagcacaggctgctcaccggagtctactacatccccgcgttgagaaactctatcatcagtttgggacagctggatgagaacggttcgcgcgtggaggtcgagcacggagtcatgaggatctgggatccctctcgtcgccttcttgccaaggtacgcaggagtgcaaatcggctttacatcctcaatgtgaaggtggcacaaccttgctgccttgctgctcgtcgagacgacggggcatggcagtggcacgagcgcttcgggcaccttaacttcgaagccttgaagcggctcagcgccaaggagatggtacgaggcctgccgtgccttgaccatgtggagcaattctgcgatgtctgcgtgttgacaaagtagagactgctccccttcccccagcagtcgagcttccgagccaaggagaggctcgagctcgtgcatggggacttgtgtggcccggtgacaccagccacaccaggaggacgacgctacttcttgctgctcgtcgacgatctctcccgctacatgtgggtgatgatccttggcagaaagggagaggctgcgaacgccatcaggcgtgtgcaggtcgctgcggaggcggagtgcggccgcaagctgtgatggaataagtcttgagcatctagaggacagcctgcttttgactgtcctctgtagtcctttagcatctagaggacagcttgactgtcctctgtagtctctttagcatctagaggacagcagtcgctttttgactgtcctctgtagtcgctttagcatctagaggacagcagtcgcttttgactgtcctctgtagtctctttagcatctagaggacaatcctgttgtatagtgtgtgtgagaaggtgtggtagtgcagcccctagggctataaatatgtgtccccaacccctctaagggtatggcattgtgtagtgtttgaggaaataaacagaaaattgccccaactcatagtgtcatcctcttgatgagagttagagtccctctacttacaattggtatcagagccaaactatcctgcagcctaaacatctcgtgttcatctccttcccgcgcctctccccacactcagtcggcagcaagagctccaactgttcctccctcccctgctcagacgagcagcctttcgtctgagacagcctcttccacacgcagcgacccctcactagcccgccatgtccctacgctcggccacttcgagtgcgcggcgccagcaggaggccgaggtcgccgcggcacaagaacgcgagcgagcagcagcagcggctgcagcgacagcgacgagggcagcacggttggcggcggcggaactggcagcggcgagagcggaagtagaagcagcggaggcggcggatgctgcacgtgcggcggcaacagagcttgaggttctgcgcggcagtagagctggcagctctgcttctgtcgacgacaacaccgacgaagagctcaggctggcgagggaagcagcgcgagagcaggcggcacagtgggcagtcgcgcatccccatgggggcgcgcgtggcggcagcccggataggcgtcgacacgctgacggcgctccaggcgggggcgcacgcggcggcagcccagacgggcgtagacgcgccggcggtgctcccggcggcggcgaccgagttgacggagatcgcggcctctacaggcggcgcggttctccctccccggatcggtaccatggtcgtcgcatggcccaagccattgtcagggacatcggtcccggcggtgggtggcctaccctcaccaagaccaactacgtcgagtgggccgtggtgatgagggtacggctccaggttcgccacatgtgggaagcagttcgttacgacgacgtcgactaccacgaggatcggcgggcgctggatgcccccattgctgcagtcccgcccgagatgcagttttcgctttcccagaagcggactgccaaggaggcctgggacgccatcgctgcgacccgcatcggcagcgatcgtgcccgcaagaccacactgcaggcacttcgcaaggagtgggagaacatgaccttcaagccaggtgaggatgttgatgactttgctctccgcctcaacactctgttgcagaagatggtgcagttcggcgacgacacctacgatgaggagagagctgttgagaagctcttccgttgcatccccgagaagtacaggcagattgctcgctcgatcgagtctctgctagacctctccacgatgacgatcgaagaggcgattggtcgcctcaaggtggtcgacggcgacgaaccacaggctctctctgggcctatccctatcggcgggaagctacatctcactcgggagcagtgggaggcctgccagggtgacaagaagcagggggagtcctcctcgacacgaggccgcaaacgcggcaagccgcgcaaggcgcgtggaggcgcccaggccggggcgcgaggacatgctgagggtggtgcacgtggaggtgcccaaggcggcgccgtcggcaacaagaagccggcacgagacgacggctgccacaactgcggcaagcttggccactgggccagggattgtcggcagctacgacgtggccaggccaacgtcgcacaggcggaggcggaggaggaggccctgctcctggcacatgcaagcatcgagccatctccagcggcaccggccgcagcggcactcctccaccttgatgagtcgaaagcacgcgctttcctcggcgacggctccaacaaggacatgatcgaaggatggtgcctcgacaccggcgccactcatcacatgaccggccgacgggagttcttcaccgagcttgactctagcgtccgaggctccgtcaagtttggggacgcctccggtgtagagatcaagggcgccggctcagtcgtcttcaccgccacgtctggtgagcacaggctgctcaccggagtctactacatccccgcgttgagaaactctatcatcagtttgggacagctggatgagaacggttcgcgcgtggaggtcgagcacggagtcatgaggatctgggatccctctcgtcgccttcttgccaaggtacgcaggagtgcaaatcggctttacatcctcaatgtgaaggtggcacaaccttgctgccttgctgctcgtcgagacgacggggcatggcagtggcacgagcgcttcgggcaccttaacttcgaagccttgaagcggctcagcgccaaggagatggtacgaggcctgccgtgccttgaccatgtggagcaattctgcgatgtctgcgtgttgacaaagtagagactgctccccttcccccagcagtcgagcttccgagccaaggagaggctcgagctcgtgcatggggacttgtgtggcccggtgacaccagccacaccaggaggacgacgctacttcttgctgctcgtcgacgatctctcccgctacatgtgggtgatgatccttggcagaaagggagaggctgcgaacgccatcaggcgtgtgcaggtcgctgcggaggcggagtgcggccgcaagctgtgatggaataagtcttgagcatctagaggacagcctgcttttgactgtcctctgtagtcctttagcatctagaggacagcttgactgtcctctgtagtctctttagcatctagaggacaacagtcgctttttgactgtcctctgtagtcgctttagcatctagaggacagcagtcgcttttgactgtcctctgtagtctctttagcatctagaggacaatcctgttgtatagtgtgtgtgagaaggtgtggtagtgcagcccctagggctataaatatgtgtccccaacccctctaagggtatggcattgtgtagtgtttgaagaaataaacagaaaattgccccaactcatagtgtcatcctctgatgagagttagagtccctctacttacaattggtatcagagccaaactatcctgcagcctaaacatctcgtgctcatctccttcccgtgcctctccccacactcagtcggtagcaagagctccaactgttccttcctcccctgctcaaacgagcagcctttcgtctgagacagcctcttccacacgcagcgacccctcactagcccaccatgtccctacgctcggccacttcgagtgcgcggcgccagcaggaggccgaggtcgccgcggcacaagaacgcgagcgagcagcagcagcggctgcagcgacagcggcgagggcagcacggttggcggcggcggaactggcagcggcgagagcggaagtagaagcagcggaggcggcggatgctgcacgtgcggcggcaacagagctcgaggttctgcgcggcagtagagctggcagctctgcttctgtcgacgacaacaccgacgacgagctcaggctggcgagggaagcagcgcgagagcaggcggcacagtgggcagccgcgcatccccatgggggcgcgcgtggcggcagcccggataggcgccgacacgctgacggcgctccaggcgggggcgcacgcggcggcagcccagacgggcgtagacgcgccggcggtgctctcggcggcggcgaccgagtcgacggagatcgcggcctctacaggcggcgcggttctccctccccggatcggtaccatggtcgtcgcatggcccaagccattgtcagggacatcggtcccgacggtgggtggcctaccctcaccaagaccaactacgtcgagtgggccgcggtgatgagggtacggctccaggttcgccacatgtgggaagcagttcgttacgacgacgtcgactaccacgaggatcggcgggcgctggatgctctcattgctgcagtcccgcccgagatgcagttttcgctttcccagaagcggactgccaagaaggcctgggacgccatcgctgcgacccgcatcggcagcgatcgtgcccgcaagaccacactgcagacacttcgcaaggagtgggagaacctggccttcaagccaggtgaggatgttgatgactttgctctctgcctcaacactctgttgcagaagatggtgcagttcggtgacgacacctacgatgaggagagagctgttgagaagctcttccgttgcatccccgagaagtacaggcagattgctcgctcgatcgagtctctgctagacctctccacgatgacgatcgaagaggcgattggtcgcctcaagggggtcgacggcgacgaaccacaggctctctctgggcctatcactatcggcgggaagctacatctcactcgggagcagtgggaggcctgccagggtgacaagaagcagggggagtcctcctcgacacgaggccgcaaacacggcaagccgcgcaaggcgcgtggaggcgcccaagccggggcgcgaggacatgctgagggtggtgcacgtggaggtgcccaaggcggcgccgtcggcaacaagaagccggcacgagacgacggctgccacaactgcggcaagcttggccactgggccagggattgtcggcagccacgacgtggccaggccaacgtcgcacaggcggaggcggaggaggaggccctgctcctggcacatgcaagcatcgagccatctccagcggcaccggccgcagcggcactcctccaccttgacgagtcgaaagcacgcgctttcctcggcgacggctccaacaaggacatgatcgaaggatggtgcctcgacaccggcgccactcatcacatgaccggccgacgagagttcttcaccgagcttgactctagcgtccgaggctccgtcaagtttggggacgcctccggcgtagagatcaagggcgccggctcagtcgtcttcaccgccgcgtctggtgagcacaggctgctcaccggagtctactacatccccgcgttgaggaactctatcatcagcttgggacagctggatgagaacggttcgcgcgtggaggtcgagcacggagtaatgaggatctgggatccctctcgtcgccttcttgccaaggtacgcaggagtgcaaatcggctttacatcctcaatgtgaaggtggcacaaccttgctgccttgctgctcgtcgagacgacggggcatggcagtggcacgagcgcttcgggcaccttaacttcgaagccctgaagcggctcagcgccaaggagatggtacgaggcctgccgtgccttgaccatgtggagcaattctgcgatgtctgcgtgttgacaaagcagagacgactccccttcccccagcagtcgagcttccgagccaaggagaggctcgagctcgtgcatggggacttgtgtggcccggtgaccccagccacaccaggaggacgacgctacttcttgctgctcgtcgacgatctctcccgctacatgtgggtgatgatccttggcagaaagggagaggctgcgaacgccatcaggcgtgtgcaggtcgctgcggaggcggagtgcggccgcaagctgtgatggaataagtcttgagcatctagaggacagcctgcttttgactgtcctctgtagtcctttagcatctagaggacagcttgactgtcctctgtagtctctttagcatctagaggacaatcctgttgtgtagtgtgtgtgagaaggtgtggtagtgcagcccctagggctataaatatgtgtccccaacccctctaagggtaatggcattgtgtagagtttgaggaaataaacagaaaattgccccaactcatagtgtcatcctcttgatgagagttagagtccctctacttacaattggtatcagagccaaactatcctgcagcctaaacatctcttgctcatctccttcccgcgcccctccccacactcagtcggcagcaagagctccaactgttccttcctcccctgctcagacgagcagcctttcgtctgagacagcctcttccacacgcagcgacccctcactagcccacgatgtccctacgctcggccacttcgagtgcgcggcgccagcaggaggccgaggtcgccgcggcacaagaacgcgagcgagcagcagcagcggctgcagcgacagcggcgagggcagcacggttggcggcggcggaactggcagcggcgagagcggaagtagaagcagcggaggcggcggatgctgcacgtgcggcggcaacagagctcgaggttctgcgcggcagtagagctggcagctctgcttctgtcgacgacaacaccgacgacgagctcaggctggcgagggaagcagcgcgagagcaggcggcacagtgggcagccgcacatccccatgggggcgcgcgtggcggcagcccggataggcgccgacacgctgacggcgctccaggcgggggcgcacgcggcggcagcccagacgggcgtagacgcgccggcggtgctcccggcggcggcgaccgagtcgacggagatcgcggcctctacaggcggcgcggttctccctccccggatcggtaccatggtcgtcgcatggcccaagccattgtcagggacatcggtcccggcggtgggtggcctaccctcaccaagaccaactacgtcgagtgggccgcggtgatgagggtacggctccaggttcgccacatgtgggaagcagttcgttacgacgacgtcgactcccacgaggatcggcgggcgctggatgctctcattgctgcagtcccgcccgagatgcagttttcgctttcccagaagcggacagccaaggaggcctgggacgccatcgctgcgacccgcatcggcagcgatcgtgcccgcaagaccacactgcaggcacttcgcaaggagtgggagaacctggccttcaagccaggtgaggatgttgatgactttgctctccgcctcaacactctgttgcagaagatggtgcagttcggcgacgacacctacgatgaggagagagctgttgagaagctcttccgttgcatccccgagaagtacaggcagattgctcgctcgatcgagtctctgctagacctctccacgatgacgatcgaagagtcgattggtcacctcaaggtggtcgacggcgacgaaccacaggctctctctgggcctatcactatcggcgggaagctacatctcactcgggagcagtgggaggcctgccagggtgacaagaagaagggggagtcctcctcgacacgaggccgcaaacgcggcaagccgcgcaaggcgcgtggaggcgcccaggccggcgcgcgaggacatgctgagggtggtgcacgtggaggtgcccaaggcggcgccgtcggcaacaagaagccggcacgagacgacggctgccacaactgcggcaagcttggccactgggccagggattgtcggcagccacgacgtggccaggccaatgtcgcacaggcggaggcggaggaggaggccctgctcctggcacatgcaagcatcgagccatctccagcggcaccggccgcagcggcactcctccaccttgatgagtcgaaagcacgcgctttcctcggcgacggctccaacaaggacatgatcgaaggatggtgcctcgacaccggcgccactcatcacatgaccggccgacgggagttcttcaccgagcttgactctagcgtccgaggctccgtcaagtttggggacgcctccggcgtagagatcaagggcgctggctcagtcgtcttcaccgccgcgtctggtgagcacaggctgctcaccggagtctactacatccccgcgttgaggaactctatcatcagcttgggacagctggatgagaacggttcacgcgtggaggtcgagcacggagtcatgaggatttgggatccctctcgtcgccttcttgccaaggtacgcaggagtctaaatcggctatacatcctcaatgtgaaggtggcacaaccttgttgtcttgctgctcgtcgagacgatggggcatggcagtggcacgagcgctttgggcaccttaacttcgaggccctgaagcggctcagtgccaaggagatggtacgaggcctgccgtgccttgaccatgtggagcaattctgcgatgtctgcgtgttgacaaagcagagatggctcccctttccccagcagtcgagcttccgagccaaggagaggcttgagctcgtgcatggggacttgtgtggcccggtgacaccagccacaccaggaggacgacgctacttcttgctgctcgtcgacgatctctcccgctacatgtgggtgatgatccttggcagcaagggagaggctgcgaacgccatcaggcgtgtgcaggtcactgcggaggcggagtgcggccgcaagctgcgcgtgctgcgcaccaacaacggcggcgaattcacgacggctgagttcgcgtcgtactgcgcggatgagggcgttcagcgccactactccgcgccgtacagcccgcagcagaacggcgtcgtcgagcggcgcaaccagacggttgtggggatggctcgggctctcctcaagcagagaggaatgccagctgtcttctggggagaggcggtggtgacagcgggttacatcctcaaccgctcgcccaccaaggctctcaacgggatgacaccgtacgaggcttggcatgggcgcaagccggcggtctctcacctacgggtcttcggctgcctcgcgttcaccaaggagcttggccacatcagcaagctcgacgataggagcaccccgggggtgttcattggctacgcggagggctcgaaggcctaccgcatctttgacccaagaacacagcgtgtgcgcacggcgcgcgacgtagtgttcgacgaagggcgaggttgggcgtgggacaaggcggtggacgacggcacgactccgacgtacgacttcaccatcgagtacgtccactttgagggagctgggggagtaggcaactcttctccgagcaggtctaccccagcccccaagtctccaccgcctccagcgccactctctccagctcctgctacaacgagctcttcaccaccacgcactccagccacgactccggctacagcgagctcttcgccaccacgtactccagcaccgacggtaccctctccgggaacgtcctctccgacaccagctcgtgtcgagcacgacccagtggagctcgtgacccctctgtcccgcgacgaggagcgcgtcgacgcgtgctacgccggcgagccgttgcggtatcgaagggtggagggccttctcatcgacccgtcggtgccaggccctgcatctcgcattctggcaggagagttgcatcttgcatgcgacgatggtgagcctcggtctttcgcggaggccgagcaacatgcggcttggcgtgccgcgatgcagtcggagatggacgcggttgagacgaaccgcacttgggagctcgctgatctccctcatggtcatcgcgcgatcacccttaagtgggtgttcaaactgaagagggatgaagccggcgccatcgtcaagcataaggctcgcttggtggcacgcggtttcttgcagcaggaggggatcgacttcgacgatgccttcgcccctgtagcacggatggaatccgtgcgactccttgcgctggcagccctggagggctggcatgttcatcacatggatgtcaagtcggcgtttcttaacggcgacttaaaggaggaggtctatgtacaccagccgccaggttttgcgatccctggcaaggagggcaaggtgttgcgcctgcgcaaggctctctacggcttgcgacaggcaccaagggcgtggaatgccaagctggattccacgctcaagaggatgggcttcatgccaagcccgcacgaggcggccatctatcgacggggcaatggagaaaatgccctgctggtgggtgtctacgtcgacgacttggtgatcaccggcgccaaggatgcagaggtggcagcgttcaaggaagagatgaaggccaccttccaaatgagtgacctggggcatctctccttctacctggggattgaggtgcaccagggagactccgggatcacacttcgccagaccgcctacgccaagcgcattgttgagctggctgggctcatcgactgcaacccagctctcactccgatggaggagaggctgaagctgagtcgcgacagcacgacgaaggaggtggatgctacacagtaccggcgtcttgtggggagccttcgctacctcgtccacacacggcctgacttggcatactccgtcggctacgttagtcggtttctgcagcgatcgacgacggagcatgagcaggctgtgaagaggatcatccgctatgttgcggggactctcgaccacggtctctactacccgaggtgccctggggaggcacaccttgtcgggtacagcgatagcgaccacgccggcgacatcgacaccagcaagagcacaagcgggatcctcttcttcctcggcaagtgccccatcagctggcagtcggtcaagcagcaggtggtggccatgtccagctgcgaggccgagtacatagcagcgtccactgcttcgactcaggctctctggctggctcgactgctcggtgatctcctcgggagagacactggagcggtggaactcagggtggacagccagtccgctctggcattggccaagaaccccgtgttccatgaacggagcaagcacatccggctgagataccacttcatccgagactgcttggcagaagggagcatcaaggcgtgctacatcaacaccaaggatcagcttgcagacctgctcaccaagccccttgggaagatcaagtttgttgagctttgctccaggtccgggatggcccaactttctcacaagacgacgcccaagacttagggggagaatgatggaataagtcttgagcatctagaggacagcctgcttttgactgtcctctgtagtctctttagcatctagaggacagcagtcgctttttgactgtcctctgtagtcgctttagcatctagaggacagcagtcgcttttgactgtcctctgtagtctctttagcatctagaggacaatcctgttgtatagtgtgtgtgagaaggtgtggtagtgcagcccctagggctataaatatgtgtccccaacccctctaagggtatggcattgtgtagtgtttgaggaaataaacagaaaattgccccaactcatagtgtcatcctcttgatgagagttagggtccctctacttacaagctgcgcgtgctgcgcaccgacaacggcggcgaattcacggcggctgagttcgcgtcgtactgcgcggatgagggcgttcagcgccactactccgcgccgtacagcccgcagcagaacggtgtcgtcgagcggcgcaaccagacggttgtggggatggctcgagctctcctcaagcagagaggaatgccagctgtcttctggggagaggcggtggtgacagcggtttacatcctcaaccgctcgcccaccaaggctctcaacgggatgacaccgtacgagacttggcatgggcgcaagccggcggtctctcacctacgggtcttcggctgcctcgcgttcaccaaggagcttggccacatcagcaagctcgacgataggagcaccccgggggtgttcattggctacgcggagggctcgaaggcctaccgcattcttgacccaagaacacagcgtgtgcgcacggcgcgcgacgtagtgttcgacgaagggcgaggatgggcgtgggacaaggcggtggacgacggcacgactccgacgtacgacttcaccatcgagtacgtccaatttgagggagctgggggagtaggcaactcttctccgagcaggtctaccccagcccccaagtctccaccaactccagcgccacactctctagctcctgctacaacgagctcttcaccaccacgcactccagccacgactccggctacagcgagctcttcgccaccacgtactccagcaccgacggtaccctctctgggaacgtcctctccgacaccagctcgtgtcgagcacgacccagtggagctcgtgacccctctgtcccgcgacgaggagcgcgtcgacgcgtgctacgccggcgagccgttgcggtatcgaagggtggagggccttctcatcgacccgtcggtgccaggccctgcatctcgcattctggcaggagagttgcatcttgcatgcgacgatggtgagcctcggtctttcgcggaggccgagcaacatgcggcttggcgtgccgcgatgcagtcggagatggacgcggttgagacgaaccgcacttgggagctcgctgatctccctcatggtcatcgcgcgatcacccttaagtgggtgttcaaactgaagagggatgaagccggcgccatcgtcaagcataaggctcgcttggtggcacgcggtttcttgcagcaggaggggatcgacttcgacgatgccttcgcccctgtagcacggatggaatccgtgcgactcctcctcgcgttggcagccctgaagggctggcatgttcatcacatggatgtcaagtcggcgtttcttaacggcgacttaaaggaggaggtctacgtacaccagccgccaggttttgcgatccctggcaaggagggcaaggtgttgcgtctgcgcaaggctctctacggcttgcgacaggcaccaagggcgtggaatgccaagctggattccacgctcaagaggatgggcttcatgccaagcccgcacgaggcggccatctatcggcggggcaatggaggaagtgccctgctggtgggtgtctacgtcgacgacttggtgatcaccggcgccaaggatgcagaggtggcagcattcaaggaagagatgaaggccaccttccaaatgagtgacccggggcacctctccttctacctggggattgaggtgcaccagggggactccgggatcacacttcgccagaccgcctacgccaagcgcattgttgagctggctgggctcaccgactgcaacccagctctcactccgatggaggagaggctgaagctgagtcgcgatagcacgacggaggaggtggacgctacacagtaccggcatcttgtggggagccttcgctacctcgtccacacacagcctgacttggcatactccgtcggctacgttagtcggtttctgcagcgaccgacgacggagcatgagcaggctgtgaagaggatcatccgctatgttgcggggactctcgaccacggtctctactacccgaggtgccctggggaggcacaccttgtcgggtacagcgatagcgaccatgccggcgacatcgacaccagcaagagcacaagcggaatcctcttcttcctcggcaagtgccccatcagctggcagtcggtcaagcagcaggtggtggccatgtccagctgcgaggtcgagtacatagcggcgtccactgcttcggctcagacgctctggctggctcgactgctcggtgatctcctcgggagagacactggagcggtggaactcagggtggacagccaatctgctctggcattggccaagaaccccgtgttccatgaacggagcaagcacatccggctgagataccacttcatccgagcctgcttggcagaagggagcatcaaggcgcgctacatcaacaccaaggatcagcttgcagacctgctcaccaagccccttggtaagatcaagtttgttgagctttgctacaggtccgggatggcccaactttctcacaagacgacgcccaagacttagggggagaatgatggaataagtcttgagcatctagaggacagcctgcttttgactgtcatctgtagtcctttagcatctagaggacagcttgactgtcctctgtagtctatttagcatctagaggacagcagtcgcttttttgactgtcctctgtagtcgctttagcatctagaggacaacagtcgcttttgactgtcctctgtagtcgctttagcatctagaggacaatcctgttgtgtagtgtgtgtgagaaggtgtggtagtgcagcccctagggctataaatatgtgtccccaacccctctaagggtatgccattgtgtagtgtttgaagaataaacagaaaattgccccaactcatagtgtcatcctcttgatgagagttagagtccctctacttacagagccatctccagcggcaccggccgcagcggcactcctccaccttgatgagtcgaaagcacgcgttttcctcggcgacggctccaacaaggacatgatcgaaggatggtgcctcgacaccggcgccactcatcacatgaccggccaacgggagttcttcaccgagcttgactctagcgtccgaggctccgtcaagtttggggacgcctccggcgtagagatcaagggcgccggctcagtcgtcttcaccgccgcgtctggtgagcacaggctgctcaccggagtctactacatccccgcgttgagtaactctatcatcagcttgggacagctggatgagaacggttcgcgcgtggaggtcgagcacggagtcatgaggatctgggatccctctcgtcgccttcttgccaaggtacgcaggagtccaaatcggctatacatcctcaatgtgaaggtggcacaaccttgctgccttgctgctcgtcgagacgacggggcatggcagtggcacgagcgcttcgggcaccttaacttcgaagccctgaagcggctcagcgccaaggagatggtacgaggcctgccgtgccttgaccatgtggagcaattctgcgatgtctgcgtgttgacaaagcagagacgactcccctttccccagcagtcgagcttccgagccaaggagaggctcgagctcgtgcatggggacttgtgtggcccggtgacaccagccacaccaggaggacgacgctacttcttgctgctcgtcgacgatctctcccgctacatgtttgtgatgatccttggcagcaagggagaggctgcgaacgccatcaggcgtgtgcaggtcgctgcggaggcggagtgcggccgcaagctgcgcgtgctgcgcaccgacaacggcggcgaattcacggcggctgagttcgcatcgtactgcgcggatgagggcgttcagcgtcactactccgcgccgtacagcccgcagcagaacggcgtcgtcgagcggcgcaaccagacggttgtggggatggctcgggctctcctcaagcagagaggaatgccagctgtcttctggggagaggcggtggtgacagcgggttacatcctcaaccgctcgcccaccaaggctctcaacgggatgacaccgtacgaggcttggcatgggcgcaagccggcggtctctcacctacgggtcttcggctgcctcgcgttcaccatggagcttggccacatcagcaagctcgacgataggagcaccccgggggtgttcattggctacgcggagggctcgaaggcctaccgcattcttgacccaagaacacagcgtgtgcgcacggcgcgcgacgtagtgttcgacgaagggcgaggatgggcgtgggacaaggcggtggacgacggcacgactccgacgtacgacttcaccatcgagtacgtccaatttgagggagctgggggagtaggcaactcttctccgagcaggtctaccccagcccccaagtctccaccaactccagcgccacactctctagctcctgctacaacgagctcttcaccaccacgcactccagccacgactccggctacagcgagctcttcgccaccacgtactccagcaccgacggtaccctctccgggaacgtcctctccgacaccagctcgtgtcgagcacgacccagtggagctcgtaacccctctgtcccgcgacgaggagcgcgtcgacgcgtgctacgacggcgagccgttgcggtatcgaagggtggagggccttctcctcgacccgtcggtgccaggccctgcatctcgcattctggcgggagagttgcatcttgcatgcgacgatggtgagcctcggtctttcgcggaggccgagaaacatgcggcttggcgttctgcgatgcagtcggagatggacgcggttgagacgaaccgcacttgggagctcgctgatctccctcatggtcatcgcgcgatcacccttaagtgggtgttcaaactgaagagggatgaagtcggcgccatcgtcaagcataaggctcgcttggtggcacgcggtttcttgcagcaggaggggatcgacttcgacgatgccttcgcccctgtagcacggatggaatccgtgcgactcctcctcgcgctggcagccctggagggctggcatgttcatcacatggatgtcaagtcggcatttcttaacggcgacttaaaggaggaggtctacgtacaccagccgccaggttttgcgatccctggcaaggaaggcaaggtgttgcgcctgtgcaaggccctctacggcttgcgacaggcaccaagggcgtggaatgccaaactggattccacgctcaagaggatgggcttcatgccaagcccgcacgaggcggccatctatcggcggggcaatggagaaaatgccctgctggtgggtgtctacgtcgatgacttggtgatcaccggcgccaaggatgcagaggtggcagcattcaaggaagagatgaaggccaccttccaaatgagtgacccggggcacctctccttctacctggggattgaggtgcaccagggggactccgggatcacacttcgccagaccgcctacgccaagcgcattgttgagctggctgggctcaccgactgcaacccagctctcactccgatggaggagaggctgaagctgagtcgcgatagcacgacggaggaggtggacgctacacagtaccggcgtcttgtggggagccttcgctacctcgtccacacacagcctgacttggcatactccgtcggctacgttagtcggtttctgcagcgaccgacgacggagcatgagcaggctgtgaagaggatcatccgctatgttgcggggactctcgaccacggtctctactacccgaggtgccctggggaggcacaccttgtcgggtacagcgatagcgaccatgccggcgacatcgacaccagcaagagcacaagcggaatcctcttcttcctcggcaagtgccccatcagctggcagtcggtcaagcagcaggtggtggccatgtccagctgcgaggtcgagtacatagtggcgtccactgcttcggctcagacgctctggctggctcgactgctcggtgatctcctcgggagagacactggagcggtggaactcagggtggacagccaatccgctctggcattggccaagaaccccgtgttccatgaacggagcaagcacatccgactgagatagcacttcatccgagcctgcttggcagaagggagcatcaaggcgcgctacatcaacaccaaggatcagcttgcagacctgctcaccaagccccttggtaagatcaagtttgttgagctttgctccaggtccgggatggcccaactgtctcacaagacgacgcccaagacttagggggagaatgatggaataagtcttgagcatctagaggacagcctgcttttgactgtcatctgtagtcctttagcatctagaggacagcttgactgtcctctgtagtctctttagcatctagaggacagcagtcgcttttttgactgtcctctgtagtcgctttagcatctagaggacaacagtcgcttttgactgtcctctgtagtcgctttagcatctagaggacaatcctgttgtgtagtgtgtgtgagaaggtgtggtagtgcagcccctagggctataaatatgtgtccccaacccctctaagggtatgccatagtgtagtgtttgaagaaataaacagaaaattgccccaactcatagtgtcatcctcttgatgagagttagagtccctctacttacagagccatctccagcggcaccggccgcagcggcactcctccaccttgatgagtcgaaagcacgcgttttcctcggcgacggctccaacaaggacatgatcgaagaatggtgcctcgacaccggcgccactcatcacatgaccggccaacgggagttcttcaccgagcttgactctagcgtccgaggctccgtcaagtttggggacgcctccggcgtagagatcaagggcgccggctcagtcgtcttcaccgccgcgtctggtgagcacaggctgctcaccggagtctactacatccccgcattgagtaactctatcatcagcttgggacagctggatgagaacggttcgcgcgtggaggtcgagcacggagtcatgaggatctgggatccctctcgtcgccttcttgccaaggtacgcaagagtccaaatcggctatacatcctcaatgtgaaggtggcacaaccttgctgccttgctgctcgtcgagacgacggggcatggcagtggcacgagcgcttcgggcaccttaacttcgaggccctgaagcggctcagtgccaaggagatggtgcgaggcctgccgtgccttgaccatgtggagcaattctgcgatgtctgcgtgttgacaaagcagagacggctcccctttccccagcagtcgagcttccgagccaaggagaggctcgagctcgtgcatggggacttgtgtggcccggtgacaccagccacaccaagaggacgacgctacttcttgctgctcgtcgacgatctctcccgctacatgtgggtgatgatccttggcagcaagggagaggctgcaaacgccatcaggcgtgtgcaggtcgctgcggaggcggagtgcggccgcaagctgcgcgtgctgcacaccgacaacggcggcgaattcacggcggctgagttcgcgtcgtactgcgcggatgagggcgttcagcgccactactccacgccatacagcccgcagcagaacggcgtcgtcgagcggcgcaaccagacggttgtggggatggctcgggctctcctcaagcagagaggaatgccagctgtcttctggggagaggcggtggtgacagcgggttacatcctcaaccgctcgcccaccaaggctctcaacgggatgacaccgtacgaggcttggcatgggcgcaagccggcggtctctcacctacgggtcttcggctgcctcgcgttcaccaaggagcttggccacatcagcaagctcgacgataggagcaccccgggggggttcattggctacgcggagggctcgaaggcctaccgcatccttgacccaagaacacagcgtgtgcgcacggcgcgcgacgtagtgttcgacgaagggcgaggatgggcgtgggacaaggcggtggacgacggcacgactccgacgtacgacttcaccatcgagtacgtccactttgagggagctgggggagtaggcaactcttctccgagcaggtctaccccagcccccaagtctccaccgactccagcgccacactctccagctcctgctacaacgagctcttcaccaccacgcactccagccacgactccggctacagcgagctcttcgccaccacgtactccagcaccgacggtaccctctccgggagcgtcctctccgacaccagctcgtgtcgagcacgacccagtggagctcgtgacccctctgtcccgcgacgaggagcgcgtcgacgcgtgctacgacggcgagccgttgcggtatcgaagggtggagggccttctcatcgacccgtcggtgccaggccctgcatctcgcattctggcaggagagttgcatcttgcatgcgacgatggtgagcctcggtctttcgcggaggccgagaaacatgcggcttggcgtgctgcgatgcagtcggagatggacgcggttgagacgaaccgcacttgggagctcgctgatctccctcatggtcatcgcgcgatcacccttaagtgggtgttcaaactgaagagggatgaagccagcgccatcgtcaagcataaggctcgcttggtggcacgcggtttcttacagcaggaggggatcgacttcgacgatgccttcgcccctgtagcacggatggaatccgtgcgactcctccttgcgctggcagccctggagggctggcatgttcatcacatggatgtcaagtcggcgtttcttaacggcgacttaaaggaggaggtctacgtacaccagccgccaggttttgcgatccctggcaaggagggcaaggtgttgcgcctgcgcaaggctctctacggcttgcgacaggcaccaagggcgtggaatgccaagctggattccacgctcaagaggaagggcttcatgccaagcccgcacgaggcggccatctatcggcggggcaatggagaaaatgccctgctggtgggtgtctacgtcgacgacttggtgatcaccggcgccaaggatgcagaggtggcagcattcaaggaagagatgaaggccaccttccaaatgagtgacttggggcatctctccttctacctggggattgaggtgcaccagggagactccgggatctcacttcgccagaccgcctatgccaggcgcattgttgagctggctgggctcaccgactgcaacccagctctcactccgatggaggagaggctgaagctgagtcgcgacagcacgacggaggaggtggatgctacacagtaccggcgtcttgtggggagccttcgctacctcgtccacacacgacctgacttggcatactccgtcggctacgttagtcggttcttgcagcgaccgacgacggagcatgagcaggctgtgaagaggatcatccgctatgttgcggggactctcgaccacggtctctactacccgaggtgccctggggaggcacaccttgtcgggtacagcgacagcgaccacgccggcgacatcgacactagcaagagcacaagcgggatcctcttcttcctcggcaattgcctcattagctggcagtcggtcaagcagcaggtggtggccatgtccagctgcgaggccgagtacatagcggcgtccactgcttcgactcaggcgctctggctggctcgactgctcgnnnnnnnnnnnnnnnnnnnnnnnnnnnnnnnnnnnnnnnnnnnnnnnnnnnnnnnnnnnnnnnnnnnnnnnnnnnnnnnnnnnnnnnnnnnnnnnnnnnnnnnnnnnnnnnnnnnnnnnnnnnnnnnnnnnnnnnnnnnnnnnnnnnnnnnnnnnnnnnnnnnnnnnnnnnnnnnnnnnnnnnnnnnnnnnnnnnnnnnnnnnnnnnnnnnnnnnnnnnnnnnnnnnnnnnnnnnnnnnnnnnnnnnnnnnnnnnnnnnnnnnnnnnnnnnnnnnnnnnnnnnnnnnnnnnnnnnnnnnnnnnnnnnnnnnnnnnnnnnnnnnnnnnnnnnnnnnnnnnnnnnnnnnnnnnnnnnnnnnnnnnnnnnnnnnnnnnnnnnnnnnnnnnnnnnnnnnnnnnnnnnnnnnnnnnnnnnnnnnnnnnnnnnnnnnnnnnnnnnnnnnnnnnnnnnnnnnnnnnnnnnnnnnnnnnnnnnnnnnnnnnnnnnnnnnnnnnncgagagctgtctcactgagttgtgagtttgaagcagtctttccgcatttgcgcggggggggggtgatggaataagtcttgagcatctagaggacagcctgcttttgactgtcctctgtagtcctttagcatctagaggacaacagtcgctttttgactgtcctctgtagtctctttagcatctagaggacaacaatcgcttttgactgtcctctgtagtcgctttagcatctagaggacagcagtcgctttttgactgtcctctgtagtctctttagcatctagaggacaatcctgttgtgtagtgtgtgtgagaaggtgtggtagtgcagcccctagggctataaatatgtgtccccaacccctctaagggtatagcattgtgtagtgtttgaggaaataaacagaaaattgacccaactcatagtgtcatcctcttgatgagagttagagtccctctacttacagggggagacttgtctcggtttatccctcccttagaccccactcatgtgggagcctccgacattggatgtactctatttgttttaaatatatgcagataaatattattttctaacaatggtgctaattcatgtataaaagtaaggagtaaaatgcatcaggtccccgaactctcaaaactaggattacgtgtcttcgaacttgacgtcttggccggtcatccaaaaccagatttgctcaaactggatgccgatgtggcgtgccatgttggagtcactttggtccccgaacttggcatgctgtatcacttgggtctcagaacttggcattttgtgccacttggcttcccgaactttctttagtacgcttcagcgtggcatgctacgttggcatcgggtttgaacaaactcggttttggatggccgactaagttcgaggacccgttttgctggttttgaaaattcgatgacccaagtgacaaatcatgctaagttcgaggaccactgatgtattttactcaaagttaagttttgggatgtgtttattgggctagggcatgctagtggggtttctctcgttgcaaaacaggggcttgtttgcaaatagttctaaaggcaccttgtgtgtgaaatgtgggttctgtgtgccaatgtcaacaagttttatggatcttgattatagatcgaattgctagaaatatagtagttcaaacagatattggaactggagctacaatttagtcattaatatactattacttcaagtatgtatgggtatcaactatcaaacataggttgtgtttgcttcagcatctgaaaagtgcttctgctctactttattgtattacaatttaactagcaccttggactatacttttggcttccaaccttttacttctccaaatggttggaaacagaaagaaattttacatgtgtatccagggcatgcttatcaagacgtccattaagcgtcacattagagtcgctttagcgctaaggcgcactcacagggcaaggcgtctagcttgccttgtgctggggagtaagacgtccgccgcggcgtaaggcgctggtggggcgtcggcagggcgttctcggagcgtcggcggggcgacgcttaggggataggtagggttttgaagggcgacggctggaaacagagaagagggtttgacctgtgtctgtgtggcagctgcagctgctgcctccttcctcgtcggcgcgcagtgctccggccatcggaggtgggagactgcggtggaagaaccgagggagagagagagaggagagctgtgggggagggagagagaggggactgaagagagatgcagcgtgagggaaaaatagaggctggcggctgctactaggttgctggcggctgtgacctaaaactgtgttttgggctgagctgggccgagttgggctggactcacttgttgtgaggttctttcctgccttttttttctgcttctactagactgaaattggacatattagaccttataaaagtgctagcttgcttattaactttaaattagtgatatataaataatgtttgatctaatttttttgatatttatctatataactaaggcctcgcctcgccttacgctttatcgcctaaaagataaaagagggttggtcgccttatgtcgccttaccgccttaataactatgatcaagggagagaaagaaaggggtaggcttcatagttgtttcaaccaaacaatttatctttttcatagtgcatagctcacatcatcttttccaaagctcacaactcacaacaacttttctatagcttagttgacccaaacaagcccataattgctttttgtttggacctaccagctaattactcatgtgagagcctctgacactaggtttgtcctactaactaactacacaacacatcataggtacgtaacctttagctctctagaaaacttgggcaagtaattcagccaccctgaaatggtgctctataaatgtctcggcttgccaaattttgtttgggccagccaaaatttgacctccaccttgggctcaactctctgaccatattgggcgcttggatcatatggaatggaaccactgtaactgttgttttattgatttttttctcgaaaagcgcaggagaactgcaccccattatattaagaccgttgtttttattgatgctaagtgtttctgaagccatgatcgtggcaggagaagagcgtcaactttggtctatgacaggggctagaggaatctcctgcttgattgtccccaaggttttgagtgcttttttagatgggacattctatgtctcctttttaatcagtgtgtttgtaactattaaatgtggtgtttgttgtgtgggttgtggttcctaaccgaatttcttcttaatataataaagtgccatctctactgcattttcgagaactttttttgacctccaagtggttgccagattgttggggcacgaccaaattttgattttgcatcctatgagtctcatactaaacgtgtcgtgaatatccttgttttatccatgatcattcatttattcatttgcttgtgccttctgtgtagacatgttttttttgcaggtatatgtgtggttgcacactcataagttgcagttgctactaccttgttagttagtctatggttttgctgctttgattgaaccaaaataaaatgttagttgcaaacttttgtcaactcagctgtgtctgtcatttgtttagtattgtcctccattatcattaaggatcagagactttgtaaatggattagtttttcatgaatgttatgatgaaaaatgatattgttctgttctttaaatatattctttgctcgcaacttatattaattgtccttgggctatgttctcatgtctattgcaggttgaatgtttacttgtagaaggtgtcttgggcaaaaggaatcttgtgtattgtgcatccacgaggtgtttgcagatctttcatgtcgttcatacatggacatacctacacacttcacattctcagatgcgtactgtttttttttcaaattccttttctatctaatcttatgtgtatattttttgttgttaaatttgcagtgctggtaaaagttttgttgctgaagttctgatgttgaggcagatactgtcaactgggaatatggcaattcttgtccttccctatgtgtcaatatgcgctgaaaaggtttttgatgatttatacagctttggattggtctgaaacatacttgtgtttgattatttatttatcttttacaggctgaacatcttgaacaacttcttgagccactgggtaggcatgtccgtagcttctacggaaaccaggggggaggctcacttcctaaagatacagcagttgctgtatgtaccatagagaaggcaaactctttggtaaacaagttgttggaggatggccgcctctctgaacttggtgtaattgtcatagatgaacttcatatggtaagcttgtctaaaaccgaagtgctgctcagaacatcctctctttgctttaaaccttttgttgttggtactttcatggttatttataccacatctattttgttatgcaagttcattgccttaggaactgtcatttcagcaatctaggtttgtgacagcattgagagtactaacgtaattttgtaacatttccattgtttgtaatcttttaatagcatgcacgagataattgccatttaatgaggatatttgttggcctgttgttagctattagtgctccttggccagtgtgcattgtggaattggatttgttttatgaaacagatggagcactagagatctggtactatctggaatctaaaaagtagagcgtgtgcattttgtatgactttcttctttaattaatacaatgatacagaactctcctgcatattgaagaaaaaacgatgtacaattgcattgcaagtagtagaggttttatcattgctaactaagagcactacaaattcttgtataggtggtgtatgtggtattggtgtactgcatatatcaatcagaacttcaaatatgatttttcctctcccccttctctccgcctgggccgttagggagtgaattcagtccaacgcctaggggctagggccaccaatctagtccaagtgatgtacctttccctactgcatcattgtttagttttttaggtgttcttttttgttcaaggtttgggatggttagtcatcaacttatcacccatcctatctaatcaagtaatcttgtgtgttactttacctgttacccgagtttccatattgttaggttataatcattaagagtaatttgtaaataagaaaggtttgtcattatggacaattgccagtaaacaagaaacaacaaggagaagtaccattggtcctggcgctgaatgaattctggcagcatacttatcaaatgcaaatcatataggaagatttgactttccttagggctcccctcatatatttgtaatattaggcccaggaccaatagtctcccagctcgccattcggctaaagcactatggcagtattactatttagcaacccctaccaaaggaagcatatagcttgcatctttacctgtctttgtttacctttccatgcccttgagggttctttcaatctttcttcctgtatcctttgacttagtttgtcgaacatgatgtgatatatagttgaaacttgttaagttctccaattatgcaattaaattaacaggttggtgaccaacatagaggatatcttttagagctgatgttgacaaagcttcgatatgctgctggtgaagggactttacagtcatgtagcggagaagtttcaagttctagcagtgggaagattgcaagtcatgggttgcagataattggtatgagtgctactatgcccaacatcgctgcggtggctgattggcttcaagtaagatatttaattctcctagttttatgtacttaatgaagggatgttttactagtgtgagaaacaacattactaacccacagaagttcaacttagcattgtcgttcatttatcatattagaaagttcaaaggcatttgataaatatgtgagcaattgaacttcctaattccacttgtattttctttcatcaactttttaaggttttttttgctgtctttcttcaaacctatagcctaacatgatatcttcatcaatattatctgatcgtatgatcgaggctactcgtatgaccaccgatcatatgactaatcactattagtcatcgattagttggtctagccagctagtcgaacatttagttgtccatgtgcctagatgacctaatcgaccatgccgagttagtatccatcgctagtctccttcgcgtcgccccacatgggcaacacgggcggaaccaaccctagcaacgcaccttcttcctcacctgattctcctcaccgtcactagagcgcgacttcacaaggaaggcaatggcatgtcattctcctctgcctcgtgatcatcgactctatcaagctcctctaccatggtttgagaaggtgctcctcccagtggccaatctctagattctagatccaccgatctctaggccagacctgcgctggttgggcctatggtggccacacagtggcagtgcagttgtcccctctcctctcacaactcttcgttcgtctttggtgggtgatgcctagatccatcgtcactgtagccggatcaggcatctcccgtgacaacggatctgcggagggcgacaacccttgtggtcccaacttcattttcaagcatgttcgggtgcttctcggctctagcactcggtcaactttggcttggcattggcatgtggcgcaaatgcaatagcaactgcattgctagcttgcatggccaccaaggatgggtgctcttagtgaggcaaacaagtgccaaacctgcaaccatgacataggagatggtgggcttgctcaggcttgcgttggtgtttgtcggtacctcaagactagggtacccactcctactggatcaaggcgggacccctgtggctatccctagtcgcatagccacaggtggtccgccctggctcagaatataggttcgtccgacgaggccgctggcctcaggtgggggccaacttccatgttgggctcttcagatccctagcagcggggctccgaagccgccacatgctccaagtatggggactccctacagctttgcctaggggcctgaccccctctgggtggtcccggacacctgcgtatgctacttgaacctccgacttaaagaggtccggtattgccacgtgtttaggcccgtgccagagggtcccggactcctctgagtaccttccgaacccccaactagtggtgctccggatctgccacgtctacagacactcctggctgattgctccctgctcgggtaaagatccggtgctgccacgtgtcttatggcgtgtgacataagccgtcgggaagagcctggcgtaagcctctggcaaggggaagggccacctgtgttcaaggcgggcagagtgcgcggctgttcacacaagtaatagatggcgcgtaccccgcattaaatgtaggtggcgtgcgcaacctgcaaggcctgcccgcgtcagaatcgcgttaccaaggcaagcccattgcgtagcttggacgcccttcattatgacttctattcctcgcgtgttattgaggcatgagggaacaggcggaggggacgggatgacaccgtccttattctccctacgctcacctacgccgcaacctacgttgtagcctttgcccacatgtcgtagcccctcctcatcttaggattagggcgggtgttatccgtcacctgtctggagtttacctctgaccgtgttgatgtttgtgtggttcgtctctaggtggtctttatagggcacgacaaccatggttggctacaacgagccttgtttgtgggcgtagcttttcacctgcaatggctctgaactagctcgagagttgcatgcggtggtggacgacaatcaacttcaccaggactacatgagtaactatgttgactacacatgttggtgtgaggagagatcttggtgcaagatttggttagtattatcttgagtcgatgatgataacacctttggggggggtgccattcccttttttggaagcgtcgatgaggtgccgtctctccttaccccacgatttgttttgaagaagctctgcctagggtccctaggctggtgatggcggcgcccagcgtcgtatcctgcctgagggcatcaccttgatcccgtactaccatggttgttggtccgcatgggacatttgctgcttgtttgtaagcctcaggttttgatgagttcgctacttgcttaaagcatgtcttttgctctcctagggtagatcaataggtgaagtcagagctgcttttgtggggtgcaacaaagcttggcaatgatgacacattatgttcacttccttcaaaagccgggtcttgttgtgagtaggtggtggtgtgttagggctttggctgatgttcgttgtgggaaatcagatctacgtatcacttttgtgggataagctcgacatcgatgacgtgtggtgtgctctgttggttgtttttgtgtatgtgggttgcttaggattagtcgtatgggttgttgtgtttaggtattggccggttttcctttgataaactgtgtgatgtggtgttttatccctgggtttccttataacctaggtcaattctatttcttaattgaaacttcctagttcctactgcgttaaaaaatgacctgatcaaccatgtatataaataaatttgatataaattggtgaatgggagaggcaagcaaccaagcacattaataacatttccaccttcctctccggcgcggacgtcgcccacctctacgcgtctagcatcgccgccgccgctactacggctccccaggcgttcaccgtgaccaccgccgctgctgcagccactgcggctggactcctacccccaacctctatagcagcctcgacctccctggctacctgacctccacggccgccttcagtgccgcctcgacattcgggactctctccccgaccgacttctcccggcagtcgcccctcggtttcaccgcccgcctgtcgtcgacgtcacttgggctccaccacgtgccgtcgcgccgtccaacgactccgccttggtcgctgccatcgccaccatccaggccgccgtggccgcctcacaggagcgccaacgcgtcgcattactccctctggagcaggaatgggccatgggttaggccctgaccactcagctggccacggctcagcgtatgcttctcggtcgtggcaccccgccaccaccggcagtgcttgcggctcccctggtggtcccggagcctcctcatggctctgggcttgacgtcgacactatcgccgccctccacgcctaggccgctggggttcacaacatacagtccctcatgttggacccgacgtcctcccactaacctcactggcgcgctcaggtggtcctcacccttcggcgtttgccctcactgaccacgtcctcgacgatctcgttgcctcgctgtccccctcctgggtctagatggacaacgtggtcctatcgtggctcaacgacacaatcaccgttgagctgcaggacatcgtctgtgatcaggcagacactgcgcgccagacatggcttgctctcgagggccagttccccaggaaccaggaggctcgggtgctccacctcgacgtccagttccatctgttttctcaggggacctctctgtgggagagtactgccgccagatgaagggcatggcgaactctctccgcgacctcggtgagcctgtcgccgacaacaccaaggtgctgaaccttctacgtggcctcagcccccgctacggccaccggaaggctctcatcaagaggaccgtgcctcaactcccgctatggtcctctcatcaagaggaccatgccgtgcggaacgagcttctttttgagtagctcaccatggagaccgaggctcctccggcatcgacactctacaacgctcctcccggcggtcagacaccctcggggggccaggcctctcgctctccatcgaccgaggcccctgctcgccatccacccgctgtcattgcgactcctcgtccggctttcaccgccgacggaggtcgtcgctccctcaagggcggccgtggggtggcagctccacccgtggtggtccctccggccggggtggcggccaggcgtgaccgtcattctacaacccctggaccaggaccatcgccatgtggccgggctaggcctcgagtgcctcccgctttccggcgtcggccctccagacagcgcctccctacgacgtgccttcgatgcctccctacggcgtgccaccaacgcctccggccgcgccctagcacccgccccgaggaccaccacctcgacgccttggtccccgctggctggcggatggggccctgcatccctcgtcaccgccttcagcaccatggcgatgaccccaccccctccgactgggtggttgattccgagcttcttaccacacaactcccactgcagacacgctctctttgtcccatcccatccattcctcccacccctcctggatcctcgttggcaacgataccactttgccggtcacctcaataggtgcctcggttttccctgggccgttctatctcaacgacgttctcgtagcccctcacataactcacaatcttctttctgttcgtcggttcaccaccgacaacttttgttccattgagtttgacccctctggttttctgtgaaggatctagccacatgacccctctcacccgctgtgacagcgccaagcccctctacacgcttcggccttccaccaccgacgcgtctccacctcccgtcctggtctccaccaccacctctaccacgtgacatcattgtctcggccacccaggacctgatgtcatgaccaaacttaacaacaatttagatccttcatgtagtaggggacattttgatggtctctgtcatgcttgtcagttagaccgacatactcgtctcccattcaccactttttggtttgaggagtcttttgacctggttcattgtgatctctgtacctcccctatactcaatctctttggttataaatactatttggtcattttggatgatttttcccattttctttggacctttcctcttcggttgaagtccgacacgttcaccaccctcacacacttcttcacctaggtctccactcagttccgtcgcccggtccgtgccctacagtgtgacagtggccgcgagttcgacaaccatgcctcccgttctttctttctcaccaacggcgtccagttgcgtctctcgtgcccctacacctctttccagaacggccgggccgaccgcataactctttctcaccatttgctgccttctcttccaggcgtctgtccctgccagctactggggtgaggccctacacaccgccacacaccttctcaactctcttccctcgaaggcggtgagccaccctactcccacttcgccctgtacgacacaaccccttcctacgaccaccttcgcgtgtttggctgtgcctgttatgctaacacttccgccatcgctcctcataagctatctccttgctccactcgctgtctcttccttggctagtcccctgaccacaaagggtattgctgtcttgacctcagctcgcaccgtatcatcatctctcgtcatgtcgtcttcgacgaagatgtgtttccttttgctggctcctcccacccaccgatctcgactccctacttgagtctgatccggttacccctctataagtagatggactctaactctcatcaagaggatgacactataagttcgggcaattttctgtttatttcctcaaacactacacaatgccatacccatctaagggttggagacatatttatagccctagaggttgcactaccacaccttctcacacacactacacaacatgattgtcctctagatgctaaagagactacaaaggacagtcaaaaagcgattgttgtcctctagatgctaaagagactacagaggacagtcaaaaagcgactgttgtcctctagatgctaaagagactacagaggacagtcaaaaagcgactgctgtcctctagatgctaaagagactacagagtacagtcaaaaaacgactgttgtcctctgatgctaaagagactacagaggacagtcaaaaaaacgactgttgtcctctagatgctcaagacttattccatcagcctccaccctaggcgtcccgccttgcgccgttgcctgtaccatgtgcggcctcgacgcctccactcgcgcctctaccggcgcggcgacgacaccgtctacctcctgctctacgtcgatgatattgtgccgacatgcaccgtcgacctcctacagcgcacgatcgtcggccctcagcggtagtttgcgacgaaggacctggggcccctccaccacttcctcggcatcaccgccgaacgctggtcccagggtctcttccttcaccagcgccagtacgccatcgacatcctggagcgggctggcatattcgactgcaagccctgctccacgcctgtcgacacttaggcgaagctctctgaggacggcggcccccggtcgccgacgcgacgtcttaccggagcctgaccggtgcgctccattacctgaccttctctaggcccgacatcgcctacaccatccagcaggtgtgcctgcatatgcacaccccgcgggagccccatctcaccgctcaagcggatcctgtgctacctccgcggctacctcgactacgacctccttctccgaccatccccgacgtcggagctcgtggtctacaccgacgctgactgggccgattgtcccgacacgcgccggtccacttccagttctgccgtgttcctgggcgccaacctcgtctcctgggctgccatgcggcagctcgtcgtctcccgctccagcgccgaggtcgagtattgcgctgtggccaatggtgtggcagaggcctcctagatgcgccagctactacacgagctccacatctctcttcagcgcacaaccctcgtctcttgcggcaatgtcagtgcggtctacctctccaccaaccccgtgcatcatcagagcacgaagcatgtggagatcgacctgcagttcgtccgcgagcgtgtcactgcctgtgacgttcgggttctcagcgtccccaccacgctgcaatacgacgacatcttcaccaaggggttaccgtcgagtgtatttttagactctcgatctagtctcaacatctgatctgtacaagatagagttgcgggggggggggggggnnnnnnnnnngcagattttaaaataaaggtgcacagatttgcttcagctctcttcgcagcctctgtgtgttcggtggttggtaatggggcaaacactctcttctggacagataaatggcttcagggccaatctttgctccagattgcccccgcgctaataaatcgggtgcccgcgaatataagacggcgcagatctgtccaagcagccttaacagccaatggttgggtgcatgatatctctggaagccttacggcgcaggtgctgtttgaatttttattggtttgggatttactccaagaggtgcaactgtaccctaatgtggaggatcaacatcggtggttgccatcctcctcggggctgtattccgccagctctgcttatttgcgcttccatggtggtgcaacaacctttgagcctgctacaagaatctggaagacttgggcccccccgcgctgcaagtatttcatttggcttgcatctctcaaccgatgttggacggctgatcgactggcacgtcatggaatggatcatccagatagttgtcccttgtgtgatcagcaggatgagtcagtgcatcacttgctggtggattgtgtttttacgagggaagtttggtttacaacactaagcaggctaggtttgcaacatcttgctcccacgtctgatgctacannnnnnnnnngggggggggggggtgttagaattccatttacggtttggggttctcctcgtgtaattactctctcacccctgtgtaatgggccatgtcctgttaactcatgtctattaatacatcacccaaccccaagatagagttagggtttcccacactgtgtaatggactaggcctaacaacctgggtctattaatacaactcccaaccctgagttagggttaggttttcccacatgtaatagaggtaggttagtttctctcccccaccccatcccaaccgcccgcttctttcccagcctccggtcgccgtcagctgcatgctctagccgttgtccgccgtgtgctcctccctgtcgtcacatcctgcagccgccgaccccgccatggatcctccccaatccgtccctcccctctccttcgcgctggatgctagcgcggacgccgggcttggtgcgacggcagccgacctcgacatgcgcgccaccgcggccctcgacgcatgcacctcgcccgcgcaccgccgcgaacgccgccgccgtgtacgccgccctaggcgtgaccccctcatcggctgatctgcacggcgccataggcgtgtgccctcccttcgctagctcgctctttccccatggctcgtcgacccgctgcgctcgctgttggcccccctacatcgacggcctcgggcccctccgcggcgcctctcctacgaccttcgctgcacaacagcgccaaggttctctgcctggcttcctcgccctcgctgctcctacatggaccgaggacgtcgcttcctcgtcaggctcctccccaacttcctcgacattggttatggatatcgccaccatccaggcggctgttgcggcctcctaggaccgtgagcgcgccacgactcttgccttggagcgcgagcgcgccatggtgccgacttgaccacccagatggccgtcgcgcaacgcctcctcctcggtcgcagtaccaccccttcaccggtggcccctgggactccccatgcccaagggcttgatgctgacaccatcattaccctccatgcttaggtcgccggggtccacaacattcggtccctcgtgtgtgttatgctggacctggcgtcctcccactaccctcggtgtcgcgcttaggtcatcctcacgcttcggtgatactcccttgttgaccatgtcctcgacgaccccgtcgttccgctgtcaccttcgtgggtacagatggacaacgtgatcctctcgtggctcaacgacaccatcaccatcgagctacaagacatcgtccgtgactaggcgaacaacgcgtaccaggcgtggctcgctctcgagggccagttcctcgggaatcgggaggctcgggcgctccatctcgacgtccagttccacctgttctctcagggggatctctctgtgggagagtactgccgccagatgaagggcatgacaaactctctccgcgacctcggcgagcccatcgccggccatatcttggtgctgaaccttctacatggcctcagcccccgctacggccacctgaaggctttcatcaagaggatcgtgccttttcccacctttcatgctgtgccgaacgagcttctcctcgagggccccgccgatcacatctacgccgcatgaagcacgtgcagcatcagcacacggagcacatggagatcgatctgcactttgtccgtgagcgggtcaccgccggtgacgttcgggttctcagcgtccccaccaagctgcagttcgccgacatcttcaccaaggggctgccgtcgagtgtcttcgccgacttccgatccagtctcaacatctgtacaagatagagactgcggggggggggggnnnnnnnnnnnnnnnnnnnnnnnnnnnnnnnnnnnnnnnnnnnnnnnnnnnnnnnnnnnnnnnnnnnnnnnnnnnnnnnnnnnnnnnnnnnnnnnnnnnnnnnnnnnnnnnnnnnnngggggggggtgttagagtactgttagggtttcggggcttgtccctgtgtaattacttgcataccctcagtgtaatgagcttggcccatatagcactcccaactcagttagggttagggtttcattctccaacagttttgttcattatgagcacattttttgtcgacttgatttgttaatagtaagttattctgtgaaggtgctaacttttgatctgtttgggtaatatgaatgatttatagttgcatacctattataattgacgctatgtaatcttaggctgctctttatcaaactgactttcgaccagttccactggaggaattcataaaagttggtaatcaaatatttgataaagacatgaacgttgttcgtgtccttcccaaagtagctgaccatggtggcaaggatccagatcatattgttgaattgtgtaatgaggtaaatctgttatttacattgcaggtcttagtttttctctgttaaacactacaattttgaagcaaattgaatattgtacttgtatttgttccaggttgttcttcagggccattctgtgcttttgttttgctccagtcgtaaaggctgcgaatcaactgcaaggcatgttgccaagttcttgaaactaccctctgttggaacaactgatgttagttcggagttttcagatgctgcagctgctattgaggccttgaggaggtgccctgctggattggatccaatattgggagaaacccttccttttggtgttgcatatcatcatgctggtcttacggtatggaagctatcttctatcttcataagatacacaaaatatcaaatatatatatatatatatttatttatttgaaatttgcactgctaaatatgtgctaagtggtgagagtggtctcactaagccaccaggtcgcgggttcaaagcaaccccttcacatttgcgggggaagggttgccttggttttatcccttccctagaacttactcacatggcctccgtcactgggtctgccctttacactgctaaatttaataaagtgatgccatttttacctaaccacagctgggcaaagggtggtaggaactgatctgccattacctgttctgattgatccaatgagcgtcatcgccttctgttctgtggcaggtcgaggagagggagattgtggaatcatgctaccgtaaaggccttgtccgtgttctgactgccacttcaactttagctgctggtgttaacttgcctgctagacgggttatattcaggcagcccaagataggtcgtgattttattgatgggactcgctatagacagatggctggtcgtgctggtcgaactggaatagacacaaaaggagaaagtgtaagctacaatatctttgttccactttattctattagagaatggttctgacatttcactagttctgttttaattgtgtttttaactttagcctaccccaactgcttgggagaaaagggctttgttgttgttgtctaataatctgacatttgaaatgcatgcagatacttgtatgcaggcctgaagaggtcaagagagttacaggtattattagaagcaattgccctcccttggagtcctgcctctcagaagataaaaatggaatgactcatgcaattatggaggttgttgctggtgggattgttcaaactgcaaatgatattcatcgttatgtgcggtgtacgctgcttaattccacaagaccttttgatgatgtcgtgaagtcagctcaagactcccttcgttggttatgccataaaagctttcttgagtggaaccatgagaccaagatatactccgctactccccttggtagagctgcttttggaagttcactcaaccctgaggaatcattggtagcatacttgtcttttgctccttcattattttattgcattgagaaagggcctctagctgagttggttaggtggtctgagtagcactccttaggttctaggtttgactttccgtgggagcgaatatcagcctgtggttacctcccatttgtctgtcccacaccaaagcacaggtctaaggtcctgtctagatcgtagtcgtttctcaaatgggctacggtgccgctgtgtatgggtggggcaggggttcgggggttttctcgacctgcgtgagaaggtcttcttaatataatacccgagggctgtcttatcccccgcaggtcgagttttttttttattttattgcattgtttaatcttgcatttttctgtttctgcactaggttgttcttgatgatctttcgagggcaagagaaggctttgttctggcatctgatttacatttagtttacttggtcacacccataaatgtagaccttgaacctgattgggaattatattacgagaaattcatgcaactttcttctcttgagcaggtatgcaagtcttcttttgtcctattgcacttgaaagttcatttatcaaactgtaaatagaatatccagaaattcgagttctatctgtactcattagaaaatagttgaaagtgaattccgaaaacatgattttagttgctgttgaactaaatgtgtgaagcaaaagtgaattcagaaaatgcaaatcaaatttgttacggttataatagtcataatattagtgtaatcttctagtctagggtttccctcatgtttctcatgtactcttatagtgcttattcatccaattcagtgcttgttaatggaatgtgtgaagtctatttcggtatttttacataaccatgaatcagactaaaacatgcatatgtttattgaactccttcgcactgtacttggttgcagtttactacatatgttatttgacctggttcataagatttttttaggagttgtcagttcttattagttttttgtaattcccatgttttctttggcccaacaagaaacagaacaactgacatgataccatgttttctgcagaacattaatcttttatcagtggtattatcattagtgccaaaatgtttataactgtatgccatgtctaccctactaaggcctaagactgtgtccaacactgttttgcactgttcacagagtggagccaaatgtgttcgcttgactttaatccgtaccggcttctattgtttctacagtatttttgtctgtatagattgcagctacagcagtccaaacagttggctttaatctgcagtagctacagacccttttggacttgcgcactgctcatgcgaaaagtggatgcgttactgttcatgtcgggtcctgggtttgttaagacagatattagattagatcgggttgacttgttggctatttctttaactctagaaaatagttaaggatcaaatctacacatctctattgggattgtatctactttgaattaagtaagaaatagatagttcaacagttcctatctggctatctacctccttaacactggctttctcgcatggccaacatgaagtatgcctgtgacaccgtatctttctgccatattggttgagaaatcaaaccattacttaaattatcaacttcagttcagttcatagaacacataatttcactcatttttttaatttctgtttgttttgttggtacaatgcagtcagtaggcaatcgggttggagtaattgaacccttcttgatgcacatggctcatggggcgtcgataccttttcgtgcaaggcctcagagaaacaccgggttaagtaacaagtctgcacaagctgctggaaatactcttgttagtgagcacacaatcagagtgtctaagcgcttttatgtggctttaatgttatcgaggcttgctcaggtataatctaagaactacttagacattgcatgttagttctatgtcaatgcatagtgctcaagatcgctagaaagcctaagtcgtgaaatgtaaaaaatagttcaatagagattagataatgaaggttgaaatgttctctcattatatatggctaattaaaatattagctcatgtcttatatttttgtagaatacacaagagagctatgtatcatttcattgagaagggtataaataaataagttacaacacacccaccacactcacacatatacacatacaaacttgtactggaaacaattcacaacacacccaacatgccttttgcatcagaacaagacccttgggtgggcatttggggaactaaaaatttgtgggtactagaaattgctacccaatttcgagtttcgacctcgaaaaagcattagccaaaattttagatacttgataatttgagttccagttttacttggtgtacctgataattccagtagcattttaaagtaagaaacaaaagtccatcaaatcatttcatatcaattaacaagaaatcaattatcaagatagtacaaatctacattgagccataccaaataatagatttacactatactgaaccactccatatcttcatattagaaaatagaagaacaaaatttttgagatattttgcgtaattcgggtataaatttacccaaactacctgaatggaattcagttttctatagctactattacgaagatggtttccatggtgacctgctagatgggctatatgggcgactcagtttgtgggaatcttatccaaggtatcaaaggtgggacgacaaccactcgaccagccgtgtttccacctgtgaattccttcacgatatgcctgccatctatggctatggcctcgcgccacctcccttttatcaaaccacgcgagcaacgtccctcccatcgggttttcaatgtttatactcgtttgtcaaaaaggaaaatgctctcttgctcagtttcttggcaacatggactttcaagaaaattttcagacacctttttggctctttctatggaagccaccgaagaatacctcaagttctatgatacaattatttcagttcaaaacaacatgcaaggcaaggataaatggatctattcttggggaaacaacaatctacgttcaagcaagatttacatattaaacttacaatccatgtacccaccttctcctttcaagtggatctagaaatccaaagtgagtaaaaagatcaaggtgctcatttggctgaccttcagagacagaatcaactcaagaaattttcttcgaagaaagatgtgtacaattacaaatgatgattacaaccatgttctttgtggccttaattgtgaggaaaccacatatcatcttttatttgaatgtccattcagtacattgtgctggaatcatgttggtattcactgggatcaccctttggatttttttgaaatgaccatatctgcgagggatcaattcagtaaaaatttcttcatggaaattctggctgttacgacctgggagattttggaagcaaagaaatgctgctatcttcatagattcctttccatcttttacgtcttggaggttttgcttcaatgacacgttggggctacaaatgcatagaatgaactcgaatcttagcttgtcgatttccttgtggcttgcttctttattttctttacttctatctccatttgcttctattcttccttccctttactgtacatttccttttttatttaatatataccactgtatgggccttccctacagtttcatcggtcaaaaaatgtccctccaatgccctccctactgccacagtctaccatgccacaggttgttgcagcactaccatgcgctcccaccatatcttgcccaatttcatgtgtatttacaagaatttactggtataagttgctgagaaagtttgggttacacagtttgacccctgagccaggacatacatccttcctagactggtgggaggagtcttctgaagaagttcatgggatggttaagaaaggtctgaactcccttatcatcttgggggcctgaatgatttggaaccattgaaaccgatgtgtctttgatggactgacttctagtctttcctcgatccttgtgtagactgatgatgagagaagggcaactttggttaaagctgtgctcactgctattcccatttatcatctaattgctttgcaatgtccaaggtgggtaatcaaggcaatagacaagattcgcaggggttttctttggaaaggaagaactgacattagaggaggacattgtgtcgttgggtggtccaaggtctgtcgtcccctctctcttggtgggttgggaattcacaatttggaagtnnnnnnnnnnnnnnnnnnnnnnnnnnnnnnnnnnnnnnnnnnnnnnnnnnnnnnnnnnnnnnnnnnnnnnnnnnnnnnnnnnnnnnnnnnnnnnnnnnnnggcccccccgcgctgcaagtatttcatttggcttgcatctctcaaccgatgttggacggctgatcgactggcacgtcatggaatggatcatccagatagttgtcccttgtgtgatcagcaggatgagtcagtgcatcacttgctggtggattgtgtttttacgagggaagtttggtttacaacactaagcaggctaggtttgcaacatcttgctcccacgtctgatgctacaaggtttcaagattggtggagtgaggcagaaagacaagtgtctaagcataagaaaaaaggtttcaactctattgtaattttagtagcttggcagatttggaagcatagaaatgcgtgtgtgtttgacaatgcttccccaaacattcacgcaattttgctgtccatccatgatgaggctttattatggggtcttggaggggctgctgctcttaggcaggtttggttgtagtttgatttttggttttttaattttcgggggtgctttcttggcacctttgtactgggtcttttctagacccttttttcttatcttcttaatatatattgatgcgtggttctcccacgtgttcgagaaaaaaagatgatgagagaagaatatgggaattagctggggccaggggtctttccttcttggcaacacctcttcttgaggtctaacccccctggctctttagtgggtagtgtgagtgtttttacatggatcctttcatttatgcgtgctgttggcctctatagggaggttttttcttgtaacccaggtcttctttagaccttcctttccctaatatatttaaagcttagttcccctgcgcttcctagaaaaaaatatctcgcccaattctcatgcaccaaattcagttcccaacatcgtcttggctgattctaggatggtttgacacattatcgctggccttggtggactacattgccgctgcccatgcagtgtcgtgcttccacaagcttgaatttcattcatacgaatgattgacgtagtgtgagtagttcttccatggctaacacaccttggaggtcgacaagtcgtatcacctattcgaacatgacacgagcacactatcgtggatcgaattcaaggacctttgcaacttgtgtttttggcccccaattcgcaacaaccgcgttgacacattggctcgtcttcgattcttgaccaagatgcaagaataccaagatcatgtcatgccaacaagcgaagttgttcgctatgggatttccaaaatatatcaatcttgacatgaaattgtgggagccccaaaatcttcatataaaatcttcatataatcctatcatgatggcacacactgaacaaccatgaccctagtgtgcgttgtggcacactgaccaaccatgaccctaatgcacaatcagcactgatgctgaactccaacgaggaccactccaatgacaagcacatggacgagcaacaactctagcgttgcacctactctgtctattaacatcaatcgagttgtctaatcatcggaaacaagggttttgtcataattgtgatgagcaatacattcatggccatcactacaagtgactcttctacactgacgttgtcaactatcaggattatattaggtggctatgttgttgtcctcagtgtggccttcctgcgcatacttgcctcgtgttctagcggtaccagtgccacgtcttatgaaggggcattaggtctacatgcgcaagaagtctagctatggttaacgactccgtcaacaccacaaactctaggttcatggaccatctcctcaacatataagttgatctttttgctgaaacaagaggactttatcggcttggcgctgccaccactgcatgcacctgctactaaggacaactctagtagatgtcaatccatacatatacccacaactctagaagaataagctccatgctcgagaacaacatccaactgagtacattagcattgttgggccttgatgcttctcatcaagaaggttggcaactcatggaggttctgctttgactacagtgtgttgaattggaagacagtgaaggataaattttcgatcctgatggtcagtgagctactcgatgagccacccaaaattctttatctagctcgacctttggtcaggctaccaccaagtccacatctaccctgacaatgcgaaatgatgtttcttacacatcatggccacttcaagtttcttgtgataccgatgagcatcgccatcgcactagccacattcaacaacctcatgagcgacatgcttcgatagttgctttgctggctcgtccttgtattttttgatgtcatcctgttatagaacatttcttggatggagcatttgcaacatgtcaaggtggtgtttgatgtgctatgtgcgaacaagttgttcatcaagtggtccaaatgccacttcggtgtgttgttcgtctcctaccttgaccatgtgatctcggtgtatggcgtggctgtggatggcgaaaaggtggaagttgtggcatcgtggccacaactgtgatccactagggaactctgttgattccaagtatcgcgggtattacaagaagtttaacaaggactttggggtcatcgtagcacctctcatgaagctcttgaatgagggtttaggtggtgccaagaagcagaagatgccatgcaggggactcaatgggctgctatcaaccgcacctatactgcagttgttggcatttgacaagctgttcacggtagactgtgatgcgtcgagttgagtgcactaaggcgccagagcattgtcattctttagtgtaggtccttcgtagctcgacatctcaaggtggtagcctacgtgtgtgatacgattggcatggtgtaggcggtacaacgttggaggcatgggcttggtgcaggcggtacaacattggagtccctacttatggggttgaagccgatatggcattggagtccctagttacggggcaccattttctgcgcttaaagttcctgctcgatcaaatacttatcaaccccaacatcaatggatcaacatgctctttgactttgatttggttgaagtgtataagtggattgcctagcttctcccatcagcttaagcttttgggttgaactggttagtgtgtccactctaacatggtatcaaagccagaggtctcgagttcgaatcctgacagagacttaatttgtgcctccacccatttatttccacgtttgcgcgtttctctttgtctgcgtttgcgcctttctctctggctacacgtgagtggggggtggtgaagtgtataagtggattgattaccttctcccattagcctaagcttttgggttgaactggttagtgcgtccactctaacatggtaacagaaccagaggtctcgagtttgaatcctggcagaggctttatttgtgtctctacccatttatttctgcgtttgctccttttccatcagcttaagttttttgcgtccactctaacatatttcatagtgaagttttgggcaagcggaacacacttgctgacaccttgtccaatctcctattgtgacattgagactgtaggcactctcaagaccctcgttctagctctataacgacatttgccacgaggtccagacacagtgagttgggcgatccttggcggatacacgatgtcctcatcctccacgacaactagatcttcctagacacatcctctagcttgttgttcacttctttggagatcgcacaagacaagtgtccataaaaacgctcaagtgcctccaagtggacttttatattgctcgaggccgcaaggtggtctgttattttgtgaaagccttttcacatgctagaggaacaaaatagaaactcttcacctgtcgggactgctctagccattgctggtgatgttgaaggtttggaagggtgactcccttgacttcatggaaggccttccaagggtgcacgagaagtgtgatcctcacagtcaccgaccatttttctaagtatgcacatttcattgccctcgttcaccacctatagattgtggcatcggttgtgaaggcgtcattcgatggtttttatggcttttctagcatccattgtaagcgaccaggaccccgtgaaaggtaacttttggctggacctcttcaagatggctggtgtgagcttcgtataagcatagctttccatctacaaactttttttttcctcgaacagcgcaggagaactgcgcgtcatttcatttaaggaagaaagtaagtacaaaggtcaagagtgacccgaaacacaaacaccaacacacacacgccatccctcaaatacaaccgtcgcgccacatcaatgaagaaggcgaccacaacctacagggctaaaaaagcaccagtaggcaccgacccaaaaacaagttcctggagtttggaagctccagccaaacaccacagccccccttccacattaacagcttttagcacttcctcaacacatggcctagaattgtcaaagacacacctgctgcggtgcttccaaatctcccaagccactaacataattagtgaattgaggcctctacgaagccccttaggaacagcagcaacagttctcttccaccaacctgggaaccgagacactagaggtggtgaatagaactattgcaatgtacttgcagtgcatcacgggagataggtcgtgcacatggctggaatgactgccatgggaagagtattgatacaatacatccttccaaatcacgctcgaagataggcgccactgcccttggtcccattcacagtgcgcaccacgcgaactcaagcagtgcagatggcgctttaggagcgtgaccggtttttggcagagctctatgaatgactggttcaagcccaatatcacgggaaacgctaatacaataagcaccatcgcaaactagagttcgagatcggctcttgggtgtggccatgaacaggttgctgaaaagtgtctctgataccaaagatgatttgtctggattgttggctttattgatacaatgacaaggaaatcatcctgaccgccctccctaggaggctctggtcataataactcacttcttgctaaacccgtaatcaacattaggtttacagataaataggcttagaggttagctgttagagaaaggtatatgctgttgcaaaagatgatgtcttgcattgagctcttagatgatttatacagagtacatggcgtaggaggtaagacaacccatggatacatatggcagtctatgaagtataatatctagactatcaaatatactctaacacatgtggcagtctactagacaatatctagactaccaaatatactctaacactaaccactcccctagaatttctcttttttcctattgttcctcctagacttccaactaagctccatgcagacaactacggaaaaactcaacaaacttgacaactaattaggcgtggctgttagccacatggtgttgtggacgctggcttgttcttcttgtggcgagtatagacttgctgataagcgtccacaacaggttgttcgtgactgctggtgtgttaactctactatgaaaatatctatgtgcagtatgaagaagctaagctatttggttcagaactgaacctgtattcagtcttagcaactctactcatcaccctcctctagttgcaacccaatagagtatttctgatatgtctttcatatcatatgcattttgtacaagcagattagattatgtccaagttgtgtattgtaatgattttaatgtaagtttgtcttgtaatatagtctttaggaattgttccttgtggtattatttattatctgtttcttcttgtcttttgtttgtttatcttttattccaagttggggtgttcccatcttgtttccttgaaaagattgtactgttctcatgtaatgcttctttcaggagattcctattgctgatgtttgtgagacatttaaggtcgccagaggtatgattcaggcactgcaggaaaatgctggcaggtttgcttcaatggtttctgcattttgtcaaaggcttggttggaatgatttagaaggccttgtttcgaaattccaaaatcgtgtctcttttggagttagggcagagattgcagaactgacatcaattccatttgtcaaggtgtgctttaattaccatgcatatatgaattatctaagtgtctctggatcttatttcagtatggtcatgtaaaatatgaaatagggttcacgtgcaagggctttgtacaagtctggtctgcgtactcctgttgccattgctgaagcatctattcctgaaattgcaaaagctctttttgaatcttctgcttggtctgggcaaggtactctttcacgtattcatggtctgattccttactactcttttttatagtacttgttttgatgaggatataaatactatagctgaaatcctgtcctgtacagtcaaggattttccttgtacttatcttgggctacctctcacaattggcaaacccacaaaggaggtcttgctgccataattgaaaaggtggcagaatttttgctgggatggaaggcttctttaatgaactgtgcaggcagattggtaatggttcgagtagtgttaactgctgctcctatttaccttttgattgccatggatctaccaaagtgggttctaaaagccatcgacaaaaggaggggtctcctctggaagggccaggaacaagctaagggaggtcactgtttggtctcttgggaaagggtgcaacagcctctggaatatggtggtcttggaattcataatctggatctgcttggctgcgcgttgcagattcgctggttgtgggctgagaaaactgatcctagtaggctttgggcaggcctccccgctcaagtccctcgcaatgcttaggccctcttcaacattgcagtggacatcattgttgggaacggtgagcaaacactcttctggacagacagatggctggatggccataccatatctgaagtggcacccagcttatttagtgctgtctcgaagcggacagccaagaggaggacggtagcccaagctctccaaaaccaaaggtgggtggatgacatcaaaggagcactcacagtccaggttatattcgagtatctaaagattgtcgcatggtggatggtctgtttttgcagcaagatgtgccggaccaattttgtgtggaaattaacacaatccgacatttacacagcatatagtgcttatttcattggcaccatcaaatttgggccatggagaagaatatggaacagttgggcacctcctcgctgtaagtttttcatttggctggtgttccataaccggtgttggacggttgatcgccttgctaagagaggcttgccccaccctgatgcgtgccagctctgtgatcaagatgatgaagacattcaccatctcttggcctgctgtgtttttgctagacaagtatgagcaagcatctttcttcagtcgggccatactgccttggcgccatatgcttcaacaatctgtttttcaaaatggtggtggacagtaatctcaactgttcctaagaaaatgcggaagggtctaaattctttgatcattttggtcgcttgggaactgtggaatcattgtaatgcttgcttgtttgagcaacataggcccaatgttcaggaagttcttagggctgttagggatgaaggtagtctctagtgcagcgctggagcaaaaaagctccaagagctaatggtcacggtgttcagtctgggggattaggagcttgttgaggttcctttccctggccgcctttcttttttctcttctgtttgggttttagcgtctccagggtgggaggcgtgatgtacagtgggtgtgggtgaggtgttcttgtatttatttttggcattcctgcctttcttctaccttaatgaaatgttgcgcagctctcttgcgttgttcgagaaaagaaaagatgcacaaattggtttctcagttacttctggatatattcagtaataagcttgcagatactttattgtttgttttaagcctactctaatgtcaatctgttgaattgactaggtgattctggtttacgacgaatgcaatttggtgtagcaaaaaaaataaaaaatggagcccgcaaaattgtcctggaggaggcagaagccgccagagtagcagcattctcagctttcaagtcacttggtgtggaagttccccagttcactgcacctccactcgcagctattgaggaatatccaactcacgataccatagaccaagctaagttaaataagctagcttctggtacccattctagagatgataaaaatatgaatacttgctctgattatgctactccaagggcttctacatacagtctaagaaaggacacaagtcctgctccttccattcaaatgaaagagaatgcaggactatctaaaaatgtgcaaatcactagacagggagcatcatcatctttgtcaacagaaattgctgatggatctagtagagatgtggctgaaaaaggtcctgtccatgcatataacttcccagggggatttgattgttttcttgatcaatggtccacagctagtaattttttctttgatgttcattttatcaagagatcgatgaaaccatctttgaacctttttgaagtttttgggttggctgtctgttgggaaaaatctcccatatactactgcaacttcccaaaagatctagtcactactggcaacaataacatcaaggaaatgtggggtaattttcagagaagatgggaaaaaatagcggacattatgaaacaaaagagtgtccaaaaaatgacatggaatttaaagatccagatccaggcacttaaatcaccttatatttcttgccaacggcttgaaaggtttcatcttgaccataaaatgctggacaaagttgaagtgcttaacaactcatatatgttgttatcaccagtctctgtctacaatggattggatatatgtctgctggcgtgggttctatggccagatgaggaaagcagagcggttccaaatcttgagaaggtatttgatatatgtcgtgttctgcaatatctttagcttttcgttgctgatgcattgtcacttcatgtacattttttatattcgtttttttctgaactttgcaaaagcaatatgagtaggaattttagttgataagagcctcaagaaccgtgtgttggatatgaaaatgcaaggaaataggattattcatatagggcatgatgagaatgctaagagactttttaggaagacttagatgtcatgtttacaactatacctatcagtaagaaacttttcataggagatctcaatgggcatgtaagtacaacaagtgtaggttttgaggtgtttcatagaggcttccccaagcttcacgtctcagacaatgtttcttgaccaagtgggtttggctatgacatgaagctaagaaacattgtctggtcatgtccactttggagcgtaccgctcgtttacgctctcgaatctgcttccttaaagatggtgataccaattccatagctatgttttctggtcgcccgaccagctagtcgaactgggggatcgaccagcgactaatctcgattagtcgtcgactaggtccgactaatcgagctctggtcgacctggtcgtcctgttcatccaggagaccaggacctatgtatatactatataatatatactattatactatatagtaaataattatataactatatagtatatatgaacttcatatactatattatgaaggatagggtaaacatgacatgaattcagcaatactgaaaagtgaaaacagcatagaaacacttctagttattaatactacaagtcccagataccagtaccacacaacacacattaatactacaagtccaaaaaaaaatctaggtcctaaacctagtcgcccagaaccggctaatcgagcgactaatcggccctaatcgtcgactagtcggacgaccagggcgaccaggtactctagtcgagtcgactgcctaatcgagctctgctaaccgactagcccgactaatcgcgactaatcgcgattagtcggacgacttgaaaacacagttccataggcatgccagtttccggaaacaaaagaactttattgggaagttggtggttgatgatcagattttcacctcgcaagatgagaaacagaagcttgatggtatcttaattgcggatgcaagaggagacttatctttcagttatatcttttggtcgaacaatgtgcttgacaagtggagtatagtggtactaatctacacgagtaagggaaatatttaaagttgtatcaattaccaagtaattaagttgatgaaccatactatgaagctatgtgagagagttatcgagcattgtttgagaggaataatgaggatctctatgaaccaatttggtttcatgtccgaaaggtcaaccatggaagttattttcttaataagacaagggatgaagcagacagggagcagaaggacctacacatggttttgttgacttggagaagacttatgacaatatactaagaaatgtcatgtgttggtttttggacaaacataaaatctcaaggaagtatgttgtagtcattaaagacatgtgttcgaacaagggatggagacacaaataacttttcgattagaatatgactacatcaagggctggctttgagcccttatctttttgccttggcgatggatgaggtcacaagagacatacaaggggataccccttggtgtatggtttttgcgcacaatgtaatgctagttgatgaaagccgagcaagagtaaatagaaaactagagttgtgatggaagactctagagtctaaaggtttagactcaatagaacttaaactagagtatatgagatatgacttcgacactactgcacatgactacatacggaaagagatcttagtttggaagtttaagtagtgcttaggaaggatatcttttagtatttagaatcaatgctatagaatgacagggtattgatgaaaatgttagccatagaatcaaagtagggtggatgaagtagtgtcaaccatatgatgttctatgtgacaagagtgtaccacagatgctaaaagacaagttttaccaaacgatgattatacctgctatgtagtatggtgtagaatgttggcctataaaaacacattttcaatagacaagaagggattgagttcgaatcatggaatggtgatacacatgataagctaggggtagcaccaattgaagaaaatcttgtctaacacctgttgagatggtttgtaccatggtttttaaagcggtaaggcgctccaaggcgttggaccaccgcctagacgcctaggcggcgcctaggcgacgcctaggcgaggtaggcgggcaaggcgcctaggcgtcagaccaccgcccggacgcctaggcgtcgcctaggcgacgcctaggcgacgccttaaaaacagtggtttgtacatgtccaacagagaactccattagcaccattgtgtagtgacgcgctaataatgggaagagagatggagaaaggctaaagttaatatggaaagaggcattaaaaggagtcaaagatttagtcttgaataagagtgcatggaaaatagctatccatgtgcctgaaacttgacttatggtttatgttgggtttcaacgctagcctatcctaacttgtttgggattaaaaggatttgttgtttcttgaatacgcaggaggtctgcgtatttttatattaagaagaaaaaaggggggggggaccccaaaacagaaacaacagttttacaaactcacaccaccattaacgcctaagacaactcctctaaaaggatttgttgttgtttgcaatagcaatacacagctgttaattttgatgctgacctatttctgataatatattacttttgcattttactttgtgataaacagtttgtcaagaggcgacttcatagtcaagaagccgctgctgcaaatcgcgatggaagatggagaaatcagatgcacaaagcagcacacaatggctgctgtagacgtgctgcacagacacgggctttgtatactgttctgaagaaattacttactcaaaatctttctgttttggttgaaacaatcgaggccccattggtacaacacctattcttacttaatactctctccagttataacaaaagtgtcattttgggttgcctgcagttaatttgtttatactttgatgctttggattgaatatctgaaaataacgcaactagattcttcctggaaagtagttcaaaatataacaactttgttatagtttcatacattttgtagcaatcgaatcatcctattagtacccatgttggtatccaaaattacacttgtgatcggaatacaatattgctgcttgtattatgcttggatatctcttatgcatttattttgacaggttaatgttcttgctgatatggagctttggggaattggcgctgacatggatgcttgtctccgtgcgaggcatattataacaaaaaagctgaaggaactagagaaagaagcttacagattggcaggcaagaatttctctctaaatgctactgctgatatcgcagacattctatatacacacctaaaattgccagttccaaaaggctgtgagaaagggaagctgcatcctagcactgacaagcagtctttggaccacctaaggtattttttcattttccttgttagttctgacatcaaacatgttatttctagttctttggaagtacttgtgtgccactttatgtccgtgcattatggatggaaaattttaaatgtgttagcatatctagtgtctagtcactgatggtctattggtagttttgtgtgagtaaaggtaaattattatgttgtcttgatcagagctagaaaagtgcttgtggaccaccggccacatgttattggcagttaatctctggacatgcttttagaatatcattgtgctaatatgcactctttttctgttttttttggagtcaattaacaggattaactcatttttcatccctaattaaatacacgcatgcatgttcaaataatatcttcaatttggaaaagcttatgccaaagagaagcacatgtatcactgctttactgtattttcagtatataggctgctgctgatgtccttattgtatgcactcggaagatcggtagcaaggcaacactacaacagccttgccaagctggtcttcctttcgtttgaaatctatggcactcttttgatttcacttggccccaaattttcctcgacataaaattgccgtggctttatagtttactataaaatccttatcaactggacataatgctctctttaggcttctattaattatcccagtaatgtaggagaatttaatttgaccattttgctaaaatatttttgaattcttctgtttcctcagggatcaacaccccattatcccattaattaaggaacacagaacattagcaaaactgttaaatggcacgttgtggtccatttgttcacgtgctcaattgtgcactcaatcacaaaggtacatcatacatggaaattggcttcagacgtcaactgccactggccgtttgtccatggaggagccaaatctgcaggtcctttagttgtaataaatgctttgcatgttttgtttggatttcagttattgagaaataacctactgacttaacctgttactatgtagtgtgttgagcatgtggtggaattcgatacagggaaaagcgataaagattactcaagcatgtcagttgatgatcatcataaaatcaatgcccgtgattttttcatacctaccaaggtttttctcatttcacttttatgtatttattaagttttccctttaattaggacagttgactattttcctgtaacaacgctttatttaatatcatgatttacttattttgtaggagaactggttattcataactgctgattactcacagattgagttgcgtttaatggctcacttttctaaagatcatatgttggttgaacttctaaagaaacctgatggtgacgtttttaccatgattgcttcaagatgggctgagaaagaagaggccttgatttcttccaaagagagagaaaacactaaaagattcatatatggcatcctttatggaatgggtgcaaactcccttgcagaacaacttcagtgcagcactgaggaagctgcacagaaaattcaaagctttaggagattttttcctggtgtttcctcatggttacatgaagttgtgttatcctgtcgccaaaaagggttagtctacttggtagcaatttctgtttagtctttctttttatataatattgctcctttgatttttgatgctaacattgaatgagctctgtgaaaaatatgttagtcttaacttttgtggtatttcatatctgaacttttgagatatttcatatttgagcatgtattatcatatctttcaatgttagtatgcgagctgcttctcataataatttaaggtgaatatgcttcatgataatttgattttatttgaatgttaagtttatacagtaaatgataaggattactgtcttttggtcatgttatttatataacgactacttaagatcagagctcctttatctgttgggttgacatatgcacttgtagcccatattgctcatgagattgtatatatattgtcgtatccactactagcggtcttacgaaaccccaaggttactaaagccatggattagagtttgggataactttcaaatgcactcatgattcaattttctttttacctggtttgtgccgatcagaattaatgtctgcgcccttcttcagtttgttgtggcctaacttgtgaaacccttgctatctcacaacttccatctgttagacaatttattttcttccctagttacgaggatttcttctctgattatgtgccagcagttgtttcctccgtacgtagctgtccttgattaggtgtggacaattggttccttcctccctggctgtttccttttagcgcccagatcatctccccgattattgtttccatgaaatcaggtggagcacgttctggtagaggcctattgttctcctgctatttagttgaatataagcaacatttcgcgctattatggcatcaagagattgttacgatcccgtgagaactcgcttttggtaatacttgcttgcccacgtcgcctccccgatgttgtgccgtcatgccacctagtgaccctctgcccgttttccggtgaccaacaacataccgaggatgcagccacataggagaaggcctgctagatccttatcgttgctgccgatgaggctgtcaaggccgtcactgccgcctaggatcatggccgcacaacccaggacgctctcgcgagggaacgctaggctgctaccggtctcaagcgtgctaaggccgctgctcgtgacgctgccttccctcctctcaacgacgaccctgatgatgacgccgacgctagtgaagacttcaattatgaggccgctaccgcctccaacctccacgtggaggccgtgggcgtacagaacctccatgcccttgtgcctgtggttctggacatcctctccacccactacagtcgctgcgggatctcgtcctcctcgccctcgagcggtatgccgtcgccgaccatgtcctcttcgacgccctatttgtgccatcctatcgacgcatggacatcgtcgtcttgtcatgggtgttgtgcacgctctccctgagtttgagttcgctcgcacccccggcggcacaacacaccacacctggatcgttgttgaggagcaattcctcggtaatcgtgaagctcgcgcccttcatcttgacgccaaattctatgtctttatgcatggtgacctctctgtcggtgactactgccacaagataaatgggatggctgacgctctcggtgatctcggagtggttgttcgtggccgcatcctcattctcaacgtgctacacagcttgaacgagaaattaaaccacatgaaggtccactttcatgcactccaagctgctaccttccttcgtctgcaacgacctcatcctcgaggagattgactacaacgcatcaacaccgccaccagcagccgcccttgttgctgtgcatggcctttcggtagctctgcttcccctagcgtcccctcttctgggggcttagctgcgcccctgtcccacccacggcgccctccggtagcatctccactggtgccgacagctattagtagctaccgtcgtcgttgcgacaacggtggcgttgaaggcaaggccatggttccctagcctttgatctacaactcgtggaccgagttagtcaccatgtggcctggccccacatgtgggccacaagaccgtggtggccaaacgccgcgcgcgcccatgcctcaggccacgcaacaacagttgacaacaacatgactagttcgtggtcatgtcgtttggcttgaggaatgcgttaacatcattctagtcccccttgagaattgaatagcactcctagctgacaccatggactcatcgcactcttcatgggttgcttggcctcacgggcttctaccgcttcttcatcaacaactacgacatcatcaccacaccatgaacatccctcaagcgtgttgccttccagtgtgctgatgtggcgactacatcctttgaggccttcaaggcggccctcacctatggactggtgctgcagttgttgagcatcacggcttcgtccatcatcgattgcgattcttcgggcattggttttggcgtgctcttgcccgatcgccttgtttagtctgtggatggagccccagcctaccaaacttgccacctaagagcgcgagctcattggccttgtgaaggctgtgcggcactagaggtcgtatgtctgggaccggccagtggagatagaagattgggtccctaatgatttctcccctactagaatactgcaacagaacctttgaatcttttagtcctgaacaagttgtgcaggctagtttcgaaatgcaacaagggaccacaatatcgatgatacagctaggcatacatcaaagaagtttctaattcgttatcactcctcagatttgttgagactttattaggccggcgacgtgttcttacaaaaataacggctggcaatagcaaagagaaagctaaagcacagaggcaagcagtaaattctatttgccaggtaatatagcattctcacatagttttagatggttgattttattgattatatgattaatatgcatgtgtttccagggttctgctgctgatattattaaggtggctatggttagagttcattcaataattactaacagaactagtgcaactgattccacagatgaagttacaaggaaattttcagaacttggtggccagtgtcaccttattttgcaggtgttttaagacttgcattgcatgatacttattttcttttgacttttgctcagtttggctctaaatatggatgaatgcaactatatatttttcatttgtaggtgcatgatgagttggtattagaagttgatccgtgcatggtagcacaggctggaaggttgttacagatatgtatggaagaagcagcttcactattgggtatcagttttaatctaaacttcgatagttatcttatgttcagtctttgggagcatcttgaaaaggtctttaaaatttacctgctaaactaatagttatgccaagtgaacaaaatgaataggaagttctatttctgccgttctccaatagttaggttcttaaaactaacaacctgggcaggagggtatggggggagcacgcaaaaactgcggaggaggaggcacaaatagtagatatgacnnnnnnnnnnnnnnnnnnnnnnnnnnnnnnnnnnnnnnnnnnnnnnnnnnnnnnnnnnnnnnnnnnnnnnnnnnnnnnnnnnnnnnnnnnnnnnnnnnnnnnnnnnnnnnnnnnnnnnnnnnnnnnnnnnnnnnnnnnnnnnnnnnnnnnnnnnnnnnnnnnnnnnnnnnnnnnnnnnnnnnnnnnnnnnnnnnnnnnnnnnnnnnnnnnnnnnnnnnnnnnnnnnnnnnnnnnnnnnnnnnnnnnnnnnnnnnnnnnnnnnnnnnnnnnnnnnnnnnnnnnnnnnnnnnnnnnnnnnnnnnnnnnnnnnnnnnnnnnnnnnnnnnnnnnnnnnnnnnnnnnnnnnnnnnnnnnnnnnnnnnnnnnnnnnnnnnnnnnnnnnnnnnnnnnnnnnnnnnnnnnnnnnnnnnnnnnnnnnnnnnnnnnnnnnnnnnnnnnnnnnnnnnncccccccccccccccaaaaaaaaaccaaaaaaagggagctgttctaagaagcccatggagatgctctaaccaaggtaaaactgaattggtgtttgcttttatttcagtacctttgcgcacaaagataaaggtgggaaaaacttggggttcactagaaccattctatcctgagccttgttgatgcaaatggttaatgtcagttggatgccaatgtttcacgacatgcaaggtcctggaagaaggctgaacaatttccaatatgccccacagggaccttggtaaatcctactcttttttatagaagattcaccccctgcagagttaatctcatgaggcctgctatttgccactatcgtttcttgttctgcattgtccatgtatttaactgatgcataccttgaaccatatatgaccatatatccgtgtgtggctttgctaatcttgtattttgaatttagtttacattttcatcttcacggtctctttgaaacttcaaatgaatcaggtgattctgtctggtgttcttcggtagaaccttcattgctatgtctacagtcttctgtcattgctgaccgtatgtgaaatcaacgcaacagcgaccagctccattactgaggatttgctatggactggtgattatcattatgattccatgtggcatgcaagaagcatatatatatatatcaccaatagatgctgttaaagggtttaaggtgtatttgaaaggtcttcctagttatactgcgaatcttttagataaacccttaagaaattggagggcctagtatatggtgatttttcttttgctaggtccagcgctaaaaaaccgattatggggtttattcaaagatgaaatttcatcctgtaactacaggttcaaggtgtatttggtttgatggatatcactatggacaagcgatggttggtttttgtacaagttggatgttgataaaaatgttggtatccatgccacacaaaaaaagcctaaccagcacccatattttgtaatccttgtcaagtatgttatatggtttacttgatagctctagcgaggctatccagtacctcaccttcaccctcatatttgtaatccttgtccacataattattagtatgttatatggttatttagtaattacgatggaaatatta

SEQ ID NO: 31 - DNA, 156 bp, Artificial Sequence
  marker ma61227s06
caataactgttattttgcaagttacgggtctaattttgttgttccagtgctatcctgcctttgaggggtgactgtgattacagcgagcagtgcyagatgaagcagaagcggagtgcgtcccagtcattcttggttccttgtgacaacgactatgtc

SEQ ID NO: 32 - DNA, 72885 bp, Artificial Sequence
  genomic DNA of mutant pol theta (c->t at position 639)
  misc_feature (5583)..(5733): n is a, c, g, or t
  misc_feature (31155)..(31650): n is a, c, g, or t
  misc_feature (44470)..(44479): n is a, c, g, or t
  misc_feature (45143)..(45152): n is a, c, g, or t
  misc_feature (46993)..(47109): n is a, c, g, or t
  misc_feature (53299)..(53398): n is a, c, g, or t
  misc_feature (71287)..(71733): n is a, c, g, or t
gcccagcaattcaaaagaaaccgaacacccttccggaaattccctctggcaatggcgtcgggctcgtctcgcccccaaatcgaccaggtaaaaccctaacctagttcctcgcctattcacttcgtcgcctccaagcgctaattcttcctgcgttccggctccatctcagttcttcccggccaagaagcggaggccctcgtcgcggaagggcgagtcgccgcgacccgggacgcagcatgagagccccggcggcgccaaggggtccctggaagggtacctcgtccgttcgccttgcaaccgtgccgtggcagcggcatcggtggtccccgtgggctcgcccaggggcggggacccgggcgccaggcgtagcctctcggccgcaatggatgtcgacgtcggttcctcggcttcggtggctgcggcggcaggtgacggggcagactttgatctcaggaggagcacggcggatttcttgtcccattcctgcaggtgagcgcgcacagtgtgaaacataaggggagttatagtattggttccaataactgttattttgcaagttacgggtctaattttgttgttccagtgctatcctgcctttgaggggtgactgtgattacagcgagcagtgccagatgaagtagaagcggagtgcgtcccagtcattcttggttccttgtgacaacgactatgtcaagaagcagcgagttgcccattgtggtggctttgaagctctaaaggttggatcaagatacactatccatccatctttagcatcgtcatatgataagtgatttcatgagtttcaactcttagtttggttctttgcaggagttagatgataatgtagcttccatgaagcaatgcatcaatcaccatggtggctcagaggctgtggaggtttagttatgcctgaacaagtcaaacctggaaccgtttctttgttttcctcttttccttttgaacttctcattatttccttttcatcaggaatctgttgagggggaacatgtgagttgtgttgggttttcggccttgcaaagatgtagctttaccccaagtactgcacagataaaagttgggttttctctagcacctgtggaaaccctaaagtctgtatcgaggaattcccttacttcacctggtgaggagttctggaatgcagcaattgaactcgctgatgggatatctgcccaggctgataaggtccgtggaaggccagaatttgatgcagcagaagacaagtcatcttgtgcagtagcagcattctttaagactcttcctagatcaggaagggatgagcttgactgtcaaaacacagtaggcagcaatgatacacatcatatagagaaattgtcaaataaagttgaatcactggcagtaaactgtcagcatataattagctcacctttgcctgtgaagcagctagatttctttcatgaggatgatattaaagtttcaggttcaaaatttgaaacaaaaggcagctatgaaacttgtaatgcacaagcagaccgtgttccactgaaaggcagtggccgcctagaaaaggaaaatctcatggaccctgtggatgtgatgaagagaagtgctattaatttgcacactgattctgcagccatgagatgtcagggtgttttcaagtcaacaactgaagggaaggttcatccaactcaagaggctggaagagattctaatcttattaggagagatctcaatcagccaacccacaatgaaaataaatcacttgctgcatattcaaataatcgcaagacttggatagattccaagagtaaagttgcttctcaggaagtggaagctagcacacctactagctccattcctctaaaggatcactcaaagatatcaagttggcttcctcctgacctttgtgctatatacatgaaaaaaggcatttcagagctgtacccttggcaggttaaggttcttttctctaattatctatttaatgaatctctggcagctagccttctttcgtctggccatttttgcctatgtatttttttctccagccatgcaaactaccactgccctctctactagtaggattaccaattatttttgctcgtaagctaagcttctttagtatttgtatcgtaataagtatgtcttgaaaactagtacttagtatatcaagtgctgagatggtttgtacatgtccaatagagaccttttagaggcaccagtgcatattagtattataaaacattaaaacgtgatagtaatgggaagaggtagggaaaggccaaacttgatatggaaagatgcaataaaaggagacttaaaatgatgaaatatatctaaagatttagtcttcaatatgattatgagtgcatggaaaacaactattcacgtgcctaaccttgatttgtggcttgtgttgggtttcaactctagtctacactcacttgcttggtactaaaaggctttgttgttattgttgattcatataaaatgctaagtcttctcttgtattgctgtcatcacattcttttcacgtttttaatgcgtttttgcttcatttttctcgaatattgtaatgctctcctagatctgtctgaaggcatgtttggtttgtgcccccactatgctaaaccaaatttggcaatagaagaaaccatgacatggccttttgtaacaccccgtccaatccctggaccggcggtacttactcctggtagctctctagaatcatatattgtccccacagaccaacacaagtcttttatgcgcactttgtcctcactcatgcgcacccgagaaaacttcccagtcggtcacccatcccaaattgctccaagccaagcacgcttaacttggaggttcttttgagataggcttcctaaaaagaagatgcaccttgttgatatggttactctattaattctattaagccttgggccaggatatcccatcccaggggccaggatatcacaattcaccccccttagaagaccgatgtcctcgtcggtcaaccccaatccaggaacctcccctcttagccacgtctgtgtgtctagtgtcgtcatatgccatgccatgtgaccactctgggcccacatgcgccatgcgccatatacccaaaccacctagcccacacacgcccgtgaaacatcgagggtcggctctgataccacttgtaacaccccgtccaatccttagaccggcggtacttactcctggtagctctctagaatcatatattgtccccacagaccaacacaagtcttttatgcgcactttgtcctcactcatgcgcacccgagaaaacttcccagtcggtcacccatcccaaattgctccaagccaaacacgcttaacttggaggttctttcgagatagacttcctaaaaagaagatacaccttgttgatatggttactctattaattctattaagccttgggccaggatatcccatcccaggggccaggatatcacacctttaggcaggtacaagatttgaattggattattggagccaaataaatttacataaatatctacctaactaaaaggaacaatgtttcttgttgccccttccacccaatgataggtggacccaaggtaatcctgcgtctcttatgtcaggtcagcactctctcgctaagagccatttgttcatgattgaatagccaagtgagatggccaccatcctcgaggtcatgttttcggacctaggatgtcaggccgaatgtgttctggttcttggagttgtattttgtttcttttaatataagccgttcggttgcataggccaaaagagcagtttgaggccaaatgaaattttagcggcgagagctgtctcactgagttgtgagtttgaagcagtctttccgcatttgcgcggggggggggtgatggaataagtcttgagcatctagaggacagcctgcttttgactgtcctctgtagtcctttagcatctagaggacaacagtcgctttttgactgtcctctgtagtctctttagcatctagaggacaacaatcgcttttgactgtcctctgtagtcgctttagcatctagaggacagcagtcgctttttgactgtcctctgtagtctctttagcatctagaggacaatcctgttgtgtagtgtgtgtgagaaggtgtggtagtgcagcccctagggctataaatatgtgtccccaacctctctaagggtatgacattgtgtagtgtttgaggaaataaacagaaaattgccccaactcatagtgtcatcctcttgatgagagttagagtccctctacttacaattggtatcagagccaaactatcctgcagcctaaacatatcgtgctcatctccttctcgcgtctctccccacactcagtcggcagcaagagctccaactgttccttcctcccctgctcagacgagcagcctttcgtctgagacagcctcttccacacgcagcaacccctcactagcccaccatgtccctacgctcggccacttcgagtgcgcggcgccagcaggaggccgaggtcgccgcggcacaagaacgcgagcgagcagcagcagcggctgcagcgacagcggcgagggcagcacggttggcggcggcggaactggcagcggcgagagcggaagtagaagcagcggaggcggcggatgctgcacgtgcggcggcaacagagctcgaggttctgcgcggcagtagagctggcagctctgcttctgtcgacgacaacaccgacgaagagctcaggctggcgagggaagcagcgcgagagcaggcggcatagtgggcagccgcgcatccccatgggggcgcgcgtggcggcagcccggatacgcgctgacggcgctctaggcggaggcgcacgcggcggcagcccagacgggcgtagacgcgccggcggtgctcccggcggcggcgaccgagtcgacggagatcgcggcctctacaggcggcgcggttctccctccccggatcggtaccatggtcgccgcatggcccaggccattgtcagggacatcggtcccggcggtggggggcctaccctcaccaagaccaactacgtcgagtgggccgcggtgatgagggtacggctccaggttcgccacatgtgggaagcagttcgttacgacgacgtcgactaccacgaggatcggcgggcgctggatgctctcattgctgtagtcccgcccgagatgcagttttcgctttcccagaagcggactgccaaggaggcctgggacgccatcgctgcgacccgcatcggcagcgatcgtgcccgcaagaccacactgcaggcacttcgcaaggagtgggagaacctggccttcaagccaggtgaggatgttgatgactttgctctccgcctcaacactctgttgcagaagatggtgcagttcggcgacgacacctacgatgaggagagagctgttgagaagctcttccgttgcatccccgagaagtacaggcagattgctcgctcgatcgagtctctgctagacctctccacgatgacgatcgaagaggcgattggtcgcctcaaggtggtggatggcgacgaaccacaggctctctctgggcctatcactatcggcgggnnnnnnnnnnnnnnnnnnnnnnnnnnnnnnnnnnnnnnnnnnnnnnnnnnnnnnnnnnnnnnnnnnnnnnnnnnnnnnnnnnnnnnnnnnnnnnnnnnnnnnnnnnnnnnnnnnnnnnnnnnnnnnnnnnnnnnnnnnnnnnnnnnnnnnncagggtgacaagaagaagggggagtcctcctcctcgacacgaggccgcaaacgcggcaagccgcgcaagccgcgtggaggcgcccaggccggggcgcgaggacatgctgagggtggtgcacgtggaggtgcccaaggcggcgccgtcggcaacaagaagccggcacgcgacgacggctgccacaactgcggcaagcttggccactgggccagggattgtcggcagccacgacgtggccaggccaacgtcgcacaagcagaggcggaggaggaggccctgctcctggcacatgcaagcatcgagccatctccagcggcaccggccgcagcggcactcctccaccttgatgagtcgaaagcacgcgctttcctcggcgacggctccaacaaggacatgatcgaaggatggtgcctcgacaccggcgccactcatcacatgaccggccgacgggagttcttcaccgagcttgactctagcgtccgaggctccgtcaagtttggggacgcctccggtgtagagatcaagggcgccggctcagtcgtcttcaccgccacgtctggtgagcacaggctgctcaccggagtctactacatccccgcgttgagaaactctatcatcagtttgggacagctggatgagaacggttcgcgcgtggaggtcgagcacggagtcatgaggatctgggatccctctcgtcgccttcttgccaaggtacgcaggagtgcaaatcggctttacatcctcaatgtgaaggtggcacaaccttgctgccttgctgctcgtcgagacgacggggcatggcagtggcacgagcgcttcgggcaccttaacttcgaagccttgaagcggctcagcgccaaggagatggtacgaggcctgccgtgccttgaccatgtggagcaattctgcgatgtctgcgtgttgacaaagtagagactgctccccttcccccagcagtcgagcttccgagccaaggagaggctcgagctcgtgcatggggacttgtgtggcccggtgacaccagccacaccaggaggacgacgctacttcttgctgctcgtcgacgatctctcccgctacatgtgggtgatgatccttggcagaaagggagaggctgcgaacgccatcaggcgtgtgcaggtcgctgcggaggcggagtgcggccgcaagctgtgatggaataagtcttgagcatctagaggacagcctgcttttgactgtcctctgtagtcctttagcatctagaggacagcttgactgtcctctgtagtctctttagcatctagaggacagcagtcgctttttgactgtcctctgtagtcgctttagcatctagaggacagcagtcgcttttgactgtcctctgtagtctctttagcatctagaggacaatcctgttgtatagtgtgtgtgagaaggtgtggtagtgcagcccctagggctataaatatgtgtccccaacccctctaagggtatggcattgtgtagtgtttgaggaaataaacagaaaattgccccaactcatagtgtcatcctcttgatgagagttagagtccctctacttacaattggtatcagagccaaactatcctgcagcctaaacatctcgtgttcatctccttcccgcgcctctccccacactcagtcggcagcaagagctccaactgttcctccctcccctgctcagacgagcagcctttcgtctgagacagcctcttccacacgcagcgacccctcactagcccgccatgtccctacgctcggccacttcgagtgcgcggcgccagcaggaggccgaggtcgccgcggcacaagaacgcgagcgagcagcagcagcggctgcagcgacagcgacgagggcagcacggttggcggcggcggaactggcagcggcgagagcggaagtagaagcagcggaggcggcggatgctgcacgtgcggcggcaacagagctcgaggttctgcgcggcagtagagctggcagctctgcttctgtcgacgacaacaccgacgacgagctcaggctggcgagggaagcagcgcgagagcaggcggcacagtgggcagccgcgcatccccatgggggcgcgcgtggcggcagcccggataggcgccgacacgctgacggcgctccaggcgggggcgcacgcggcggcagcccagacgggcgtagacgcgccgacggtgctcccggcggcggcgaccgagtcgacggagatcgcggcctctacaggcggcgcggttctccctccccggatcggtaccatggtcgtcgcatggcccaagccattgtcagggacatcggtcccgacggtgggtggcctaccctcaccaagaccaactacgtcgagtgggccgcggtgatgagggtacggctccaggttcgccacatgtgggaagcagttcgttacgacgacgtcgactaccacgaggatcggcgggcgctggatgctctcattgctgcagtcccgcccgagatgcagttttcgctttcccagaagcggactgccaaggaggcctgggacgccatcgctgcgacccgcatcggcagcgatcgtgcccgcaagaccacactgcaggcacttcgcaaggagtgggagaacctggctttcatgccaggtgaggatgttgatgactttgctctccgcctcaacactctgttgcagaagatggtgcagttcggcgacgacacctacgatgaggagagagctgttgagaagctcttccgttgcatccccgagaagtacaggcagattgctcgctcgatcgagtctctgctagacctctccacgatgacgatcgaagaggcgattggtcgcctcaaggtggtcgacggcgacgaaccacaggctctctctgggcctatcactatcggcgggaagctacatctcactcgggagcagtgggaggcctgccagggtgacaagaaggagtcctcctcgacacgaggccgcaaacgcggcaagccgcgcaaggcgcgtggaggcgcccaggccggggcgcgaggacatgctgagggtggtgcacgtggaggtgcccaaggcggcgccgtcggcaacaagaagccgacacgagacgacggctgccacaactgcggcaagcttggccactgggccagggattgtcggcagccacgacgtggccaggccaacgacgcacaggcggaggcggaggaggaggccctgctcctggcacatgcaagcatcgagccatctccagcggcaccggccgcagcggcactcctccaccttgatgagtcgaaagcacgcgctttcctcggcgacggctccaacaaggacatgatcgaaggatggtgcctcgacaccggcgccactcatcacatgaccggccgacgggagttcttcaccgagcttgactctagcgtccgaggctccgtcaagtttggggacgcctccggtgtagagatcaagggcgccggctcagtcgtcttcaccgccacgtctggtgagcacaggctgctcaccggagtctactacatccccgcgttgagaaactctatcatcagtttgggacagctggatgagaacggttcgcgcgtggaggtcgagcacggagtcatgaggatctgggatccctctcgtcgccttcttgccaaggtacgcaggagtgcaaatcggctttacatcctcaatgtgaaggtggcacaaccttgctgccttgctgctcgtcgagacgacggggcatggcagtggcacgagcgcttcgggcaccttaacttcgaagccttgaagcggctcagcgccaaggagatggtacgaggcctgccgtgccttgaccatgtggagcaattctgcgatgtctgcgtgttgacaaagtagagactgctccccttcccccagcagtcgagcttccgagccaaggagaggctcgagctcgtgcatggggacttgtgtggcccggtgacaccagccacaccaggaggacgacgctacttcttgctgctcgtcgacgatctctcccgctacatgtgggtgatgatccttggcagaaagggagaggctgcgaacgccatcaggcgtgtgcaggtcgctgcggaggcggagtgcggccgcaagctgtgatggaataagtcttgagcatctagaggacagcctgcttttgactgtcctctgtagtcctttagcatctagaggacagcttgactgtcctctgtagtctctttagcatctagaggacagcagtcgctttttgactgtcctctgtagtcgctttagcatctagaggacagcagtcgcttttgactgtcctctgtagtctctttagcatctagaggacaatcctgttgtatagtgtgtgtgagaaggtgtggtagtgcagcccctagggctataaatatgtgtccccaacccctctaagggtatggcattgtgtagtgtttgaggaaataaacagaaaattgccccaactcatagtgtcatcctcttgatgagagttagagtccctctacttacaattggtatcagagccaaactatcctgcagcctaaacatctcgtgttcatctccttcccgcgcctctccccacactcagtcggcagcaagagctccaactgttcctccctcccctgctcagacgagcagcctttcgtctgagacagcctcttccacacgcagcgacccctcactagcccgccatgtccctacgctcggccacttcgagtgcgcggcgccagcaggaggccgaggtcgccgcggcacaagaacgcgagcgagcagcagcagcggctgcagcgacagcgacgagggcagcacggttggcggcggcggaactggcagcggcgagagcggaagtagaagcagcggaggcggcggatgctgcacgtgcggcggcaacagagcttgaggttctgcgcggcagtagagctggcagctctgcttctgtcgacgacaacaccgacgaagagctcaggctggcgagggaagcagcgcgagagcaggcggcacagtgggcagtcgcgcatccccatgggggcgcgcgtggcggcagcccggataggcgtcgacacgctgacggcgctccaggcgggggcgcacgcggcggcagcccagacgggcgtagacgcgccggcggtgctcccggcggcggcgaccgagttgacggagatcgcggcctctacaggcggcgcggttctccctccccggatcggtaccatggtcgtcgcatggcccaagccattgtcagggacatcggtcccggcggtgggtggcctaccctcaccaagaccaactacgtcgagtgggccgtggtgatgagggtacggctccaggttcgccacatgtgggaagcagttcgttacgacgacgtcgactaccacgaggatcggcgggcgctggatgcccccattgctgcagtcccgcccgagatgcagttttcgctttcccagaagcggactgccaaggaggcctgggacgccatcgctgcgacccgcatcggcagcgatcgtgcccgcaagaccacactgcaggcacttcgcaaggagtgggagaacatgaccttcaagccaggtgaggatgttgatgactttgctctccgcctcaacactctgttgcagaagatggtgcagttcggcgacgacacctacgatgaggagagagctgttgagaagctcttccgttgcatccccgagaagtacaggcagattgctcgctcgatcgagtctctgctagacctctccacgatgacgatcgaagaggcgattggtcgcctcaaggtggtcgacggcgacgaaccacaggctctctctgggcctatccctatcggcgggaagctacatctcactcgggagcagtgggaggcctgccagggtgacaagaagcagggggagtcctcctcgacacgaggccgcaaacgcggcaagccgcgcaaggcgcgtggaggcgcccaggccggggcgcgaggacatgctgagggtggtgcacgtggaggtgcccaaggcggcgccgtcggcaacaagaagccggcacgagacgacggctgccacaactgcggcaagcttggccactgggccagggattgtcggcagctacgacgtggccaggccaacgtcgcacaggcggaggcggaggaggaggccctgctcctggcacatgcaagcatcgagccatctccagcggcaccggccgcagcggcactcctccaccttgatgagtcgaaagcacgcgctttcctcggcgacggctccaacaaggacatgatcgaaggatggtgcctcgacaccggcgccactcatcacatgaccggccgacgggagttcttcaccgagcttgactctagcgtccgaggctccgtcaagtttggggacgcctccggtgtagagatcaagggcgccggctcagtcgtcttcaccgccacgtctggtgagcacaggctgctcaccggagtctactacatccccgcgttgagaaactctatcatcagtttgggacagctggatgagaacggttcgcgcgtggaggtcgagcacggagtcatgaggatctgggatccctctcgtcgccttcttgccaaggtacgcaggagtgcaaatcggctttacatcctcaatgtgaaggtggcacaaccttgctgccttgctgctcgtcgagacgacggggcatggcagtggcacgagcgcttcgggcaccttaacttcgaagccttgaagcggctcagcgccaaggagatggtacgaggcctgccgtgccttgaccatgtggagcaattctgcgatgtctgcgtgttgacaaagtagagactgctccccttcccccagcagtcgagcttccgagccaaggagaggctcgagctcgtgcatggggacttgtgtggcccggtgacaccagccacaccaggaggacgacgctacttcttgctgctcgtcgacgatctctcccgctacatgtgggtgatgatccttggcagaaagggagaggctgcgaacgccatcaggcgtgtgcaggtcgctgcggaggcggagtgcggccgcaagctgtgatggaataagtcttgagcatctagaggacagcctgcttttgactgtcctctgtagtcctttagcatctagaggacagcttgactgtcctctgtagtctctttagcatctagaggacaacagtcgctttttgactgtcctctgtagtcgctttagcatctagaggacagcagtcgcttttgactgtcctctgtagtctctttagcatctagaggacaatcctgttgtatagtgtgtgtgagaaggtgtggtagtgcagcccctagggctataaatatgtgtccccaacccctctaagggtatggcattgtgtagtgtttgaagaaataaacagaaaattgccccaactcatagtgtcatcctctgatgagagttagagtccctctacttacaattggtatcagagccaaactatcctgcagcctaaacatctcgtgctcatctccttcccgtgcctctccccacactcagtcggtagcaagagctccaactgttccttcctcccctgctcaaacgagcagcctttcgtctgagacagcctcttccacacgcagcgacccctcactagcccaccatgtccctacgctcggccacttcgagtgcgcggcgccagcaggaggccgaggtcgccgcggcacaagaacgcgagcgagcagcagcagcggctgcagcgacagcggcgagggcagcacggttggcggcggcggaactggcagcggcgagagcggaagtagaagcagcggaggcggcggatgctgcacgtgcggcggcaacagagctcgaggttctgcgcggcagtagagctggcagctctgcttctgtcgacgacaacaccgacgacgagctcaggctggcgagggaagcagcgcgagagcaggcggcacagtgggcagccgcgcatccccatgggggcgcgcgtggcggcagcccggataggcgccgacacgctgacggcgctccaggcgggggcgcacgcggcggcagcccagacgggcgtagacgcgccggcggtgctctcggcggcggcgaccgagtcgacggagatcgcggcctctacaggcggcgcggttctccctccccggatcggtaccatggtcgtcgcatggcccaagccattgtcagggacatcggtcccgacggtgggtggcctaccctcaccaagaccaactacgtcgagtgggccgcggtgatgagggtacggctccaggttcgccacatgtgggaagcagttcgttacgacgacgtcgactaccacgaggatcggcgggcgctggatgctctcattgctgcagtcccgcccgagatgcagttttcgctttcccagaagcggactgccaagaaggcctgggacgccatcgctgcgacccgcatcggcagcgatcgtgcccgcaagaccacactgcagacacttcgcaaggagtgggagaacctggccttcaagccaggtgaggatgttgatgactttgctctctgcctcaacactctgttgcagaagatggtgcagttcggtgacgacacctacgatgaggagagagctgttgagaagctcttccgttgcatccccgagaagtacaggcagattgctcgctcgatcgagtctctgctagacctctccacgatgacgatcgaagaggcgattggtcgcctcaagggggtcgacggcgacgaaccacaggctctctctgggcctatcactatcggcgggaagctacatctcactcgggagcagtgggaggcctgccagggtgacaagaagcagggggagtcctcctcgacacgaggccgcaaacacggcaagccgcgcaaggcgcgtggaggcgcccaagccggggcgcgaggacatgctgagggtggtgcacgtggaggtgcccaaggcggcgccgtcggcaacaagaagccggcacgagacgacggctgccacaactgcggcaagcttggccactgggccagggattgtcggcagccacgacgtggccaggccaacgtcgcacaggcggaggcggaggaggaggccctgctcctggcacatgcaagcatcgagccatctccagcggcaccggccgcagcggcactcctccaccttgacgagtcgaaagcacgcgctttcctcggcgacggctccaacaaggacatgatcgaaggatggtgcctcgacaccggcgccactcatcacatgaccggccgacgagagttcttcaccgagcttgactctagcgtccgaggctccgtcaagtttggggacgcctccggcgtagagatcaagggcgccggctcagtcgtcttcaccgccgcgtctggtgagcacaggctgctcaccggagtctactacatccccgcgttgaggaactctatcatcagcttgggacagctggatgagaacggttcgcgcgtggaggtcgagcacggagtaatgaggatctgggatccctctcgtcgccttcttgccaaggtacgcaggagtgcaaatcggctttacatcctcaatgtgaaggtggcacaaccttgctgccttgctgctcgtcgagacgacggggcatggcagtggcacgagcgcttcgggcaccttaacttcgaagccctgaagcggctcagcgccaaggagatggtacgaggcctgccgtgccttgaccatgtggagcaattctgcgatgtctgcgtgttgacaaagcagagacgactccccttcccccagcagtcgagcttccgagccaaggagaggctcgagctcgtgcatggggacttgtgtggcccggtgaccccagccacaccaggaggacgacgctacttcttgctgctcgtcgacgatctctcccgctacatgtgggtgatgatccttggcagaaagggagaggctgcgaacgccatcaggcgtgtgcaggtcgctgcggaggcggagtgcggccgcaagctgtgatggaataagtcttgagcatctagaggacagcctgcttttgactgtcctctgtagtcctttagcatctagaggacagcttgactgtcctctgtagtctctttagcatctagaggacaatcctgttgtgtagtgtgtgtgagaaggtgtggtagtgcagcccctagggctataaatatgtgtccccaacccctctaagggtaatggcattgtgtagagtttgaggaaataaacagaaaattgccccaactcatagtgtcatcctcttgatgagagttagagtccctctacttacaattggtatcagagccaaactatcctgcagcctaaacatctcttgctcatctccttcccgcgcccctccccacactcagtcggcagcaagagctccaactgttccttcctcccctgctcagacgagcagcctttcgtctgagacagcctcttccacacgcagcgacccctcactagcccacgatgtccctacgctcggccacttcgagtgcgcggcgccagcaggaggccgaggtcgccgcggcacaagaacgcgagcgagcagcagcagcggctgcagcgacagcggcgagggcagcacggttggcggcggcggaactggcagcggcgagagcggaagtagaagcagcggaggcggcggatgctgcacgtgcggcggcaacagagctcgaggttctgcgcggcagtagagctggcagctctgcttctgtcgacgacaacaccgacgacgagctcaggctggcgagggaagcagcgcgagagcaggcggcacagtgggcagccgcacatccccatgggggcgcgcgtggcggcagcccggataggcgccgacacgctgacggcgctccaggcgggggcgcacgcggcggcagcccagacgggcgtagacgcgccggcggtgctcccggcggcggcgaccgagtcgacggagatcgcggcctctacaggcggcgcggttctccctccccggatcggtaccatggtcgtcgcatggcccaagccattgtcagggacatcggtcccggcggtgggtggcctaccctcaccaagaccaactacgtcgagtgggccgcggtgatgagggtacggctccaggttcgccacatgtgggaagcagttcgttacgacgacgtcgactcccacgaggatcggcgggcgctggatgctctcattgctgcagtcccgcccgagatgcagttttcgctttcccagaagcggacagccaaggaggcctgggacgccatcgctgcgacccgcatcggcagcgatcgtgcccgcaagaccacactgcaggcacttcgcaaggagtgggagaacctggccttcaagccaggtgaggatgttgatgactttgctctccgcctcaacactctgttgcagaagatggtgcagttcggcgacgacacctacgatgaggagagagctgttgagaagctcttccgttgcatccccgagaagtacaggcagattgctcgctcgatcgagtctctgctagacctctccacgatgacgatcgaagagtcgattggtcacctcaaggtggtcgacggcgacgaaccacaggctctctctgggcctatcactatcggcgggaagctacatctcactcgggagcagtgggaggcctgccagggtgacaagaagaagggggagtcctcctcgacacgaggccgcaaacgcggcaagccgcgcaaggcgcgtggaggcgcccaggccggcgcgcgaggacatgctgagggtggtgcacgtggaggtgcccaaggcggcgccgtcggcaacaagaagccggcacgagacgacggctgccacaactgcggcaagcttggccactgggccagggattgtcggcagccacgacgtggccaggccaatgtcgcacaggcggaggcggaggaggaggccctgctcctggcacatgcaagcatcgagccatctccagcggcaccggccgcagcggcactcctccaccttgatgagtcgaaagcacgcgctttcctcggcgacggctccaacaaggacatgatcgaaggatggtgcctcgacaccggcgccactcatcacatgaccggccgacgggagttcttcaccgagcttgactctagcgtccgaggctccgtcaagtttggggacgcctccggcgtagagatcaagggcgctggctcagtcgtcttcaccgccgcgtctggtgagcacaggctgctcaccggagtctactacatccccgcgttgaggaactctatcatcagcttgggacagctggatgagaacggttcacgcgtggaggtcgagcacggagtcatgaggatttgggatccctctcgtcgccttcttgccaaggtacgcaggagtctaaatcggctatacatcctcaatgtgaaggtggcacaaccttgttgtcttgctgctcgtcgagacgatggggcatggcagtggcacgagcgctttgggcaccttaacttcgaggccctgaagcggctcagtgccaaggagatggtacgaggcctgccgtgccttgaccatgtggagcaattctgcgatgtctgcgtgttgacaaagcagagatggctcccctttccccagcagtcgagcttccgagccaaggagaggcttgagctcgtgcatggggacttgtgtggcccggtgacaccagccacaccaggaggacgacgctacttcttgctgctcgtcgacgatctctcccgctacatgtgggtgatgatccttggcagcaagggagaggctgcgaacgccatcaggcgtgtgcaggtcactgcggaggcggagtgcggccgcaagctgcgcgtgctgcgcaccaacaacggcggcgaattcacgacggctgagttcgcgtcgtactgcgcggatgagggcgttcagcgccactactccgcgccgtacagcccgcagcagaacggcgtcgtcgagcggcgcaaccagacggttgtggggatggctcgggctctcctcaagcagagaggaatgccagctgtcttctggggagaggcggtggtgacagcgggttacatcctcaaccgctcgcccaccaaggctctcaacgggatgacaccgtacgaggcttggcatgggcgcaagccggcggtctctcacctacgggtcttcggctgcctcgcgttcaccaaggagcttggccacatcagcaagctcgacgataggagcaccccgggggtgttcattggctacgcggagggctcgaaggcctaccgcatctttgacccaagaacacagcgtgtgcgcacggcgcgcgacgtagtgttcgacgaagggcgaggttgggcgtgggacaaggcggtggacgacggcacgactccgacgtacgacttcaccatcgagtacgtccactttgagggagctgggggagtaggcaactcttctccgagcaggtctaccccagcccccaagtctccaccgcctccagcgccactctctccagctcctgctacaacgagctcttcaccaccacgcactccagccacgactccggctacagcgagctcttcgccaccacgtactccagcaccgacggtaccctctccgggaacgtcctctccgacaccagctcgtgtcgagcacgacccagtggagctcgtgacccctctgtcccgcgacgaggagcgcgtcgacgcgtgctacgccggcgagccgttgcggtatcgaagggtggagggccttctcatcgacccgtcggtgccaggccctgcatctcgcattctggcaggagagttgcatcttgcatgcgacgatggtgagcctcggtctttcgcggaggccgagcaacatgcggcttggcgtgccgcgatgcagtcggagatggacgcggttgagacgaaccgcacttgggagctcgctgatctccctcatggtcatcgcgcgatcacccttaagtgggtgttcaaactgaagagggatgaagccggcgccatcgtcaagcataaggctcgcttggtggcacgcggtttcttgcagcaggaggggatcgacttcgacgatgccttcgcccctgtagcacggatggaatccgtgcgactccttgcgctggcagccctggagggctggcatgttcatcacatggatgtcaagtcggcgtttcttaacggcgacttaaaggaggaggtctatgtacaccagccgccaggttttgcgatccctggcaaggagggcaaggtgttgcgcctgcgcaaggctctctacggcttgcgacaggcaccaagggcgtggaatgccaagctggattccacgctcaagaggatgggcttcatgccaagcccgcacgaggcggccatctatcgacggggcaatggagaaaatgccctgctggtgggtgtctacgtcgacgacttggtgatcaccggcgccaaggatgcagaggtggcagcgttcaaggaagagatgaaggccaccttccaaatgagtgacctggggcatctctccttctacctggggattgaggtgcaccagggagactccgggatcacacttcgccagaccgcctacgccaagcgcattgttgagctggctgggctcatcgactgcaacccagctctcactccgatggaggagaggctgaagctgagtcgcgacagcacgacgaaggaggtggatgctacacagtaccggcgtcttgtggggagccttcgctacctcgtccacacacggcctgacttggcatactccgtcggctacgttagtcggtttctgcagcgatcgacgacggagcatgagcaggctgtgaagaggatcatccgctatgttgcggggactctcgaccacggtctctactacccgaggtgccctggggaggcacaccttgtcgggtacagcgatagcgaccacgccggcgacatcgacaccagcaagagcacaagcgggatcctcttcttcctcggcaagtgccccatcagctggcagtcggtcaagcagcaggtggtggccatgtccagctgcgaggccgagtacatagcagcgtccactgcttcgactcaggctctctggctggctcgactgctcggtgatctcctcgggagagacactggagcggtggaactcagggtggacagccagtccgctctggcattggccaagaaccccgtgttccatgaacggagcaagcacatccggctgagataccacttcatccgagactgcttggcagaagggagcatcaaggcgtgctacatcaacaccaaggatcagcttgcagacctgctcaccaagccccttgggaagatcaagtttgttgagctttgctccaggtccgggatggcccaactttctcacaagacgacgcccaagacttagggggagaatgatggaataagtcttgagcatctagaggacagcctgcttttgactgtcctctgtagtctctttagcatctagaggacagcagtcgctttttgactgtcctctgtagtcgctttagcatctagaggacagcagtcgcttttgactgtcctctgtagtctctttagcatctagaggacaatcctgttgtatagtgtgtgtgagaaggtgtggtagtgcagcccctagggctataaatatgtgtccccaacccctctaagggtatggcattgtgtagtgtttgaggaaataaacagaaaattgccccaactcatagtgtcatcctcttgatgagagttagggtccctctacttacaagctgcgcgtgctgcgcaccgacaacggcggcgaattcacggcggctgagttcgcgtcgtactgcgcggatgagggcgttcagcgccactactccgcgccgtacagcccgcagcagaacggtgtcgtcgagcggcgcaaccagacggttgtggggatggctcgagctctcctcaagcagagaggaatgccagctgtcttctggggagaggcggtggtgacagcggtttacatcctcaaccgctcgcccaccaaggctctcaacgggatgacaccgtacgagacttggcatgggcgcaagccggcggtctctcacctacgggtcttcggctgcctcgcgttcaccaaggagcttggccacatcagcaagctcgacgataggagcaccccgggggtgttcattggctacgcggagggctcgaaggcctaccgcattcttgacccaagaacacagcgtgtgcgcacggcgcgcgacgtagtgttcgacgaagggcgaggatgggcgtgggacaaggcggtggacgacggcacgactccgacgtacgacttcaccatcgagtacgtccaatttgagggagctgggggagtaggcaactcttctccgagcaggtctaccccagcccccaagtctccaccaactccagcgccacactctctagctcctgctacaacgagctcttcaccaccacgcactccagccacgactccggctacagcgagctcttcgccaccacgtactccagcaccgacggtaccctctctgggaacgtcctctccgacaccagctcgtgtcgagcacgacccagtggagctcgtgacccctctgtcccgcgacgaggagcgcgtcgacgcgtgctacgccggcgagccgttgcggtatcgaagggtggagggccttctcatcgacccgtcggtgccaggccctgcatctcgcattctggcaggagagttgcatcttgcatgcgacgatggtgagcctcggtctttcgcggaggccgagcaacatgcggcttggcgtgccgcgatgcagtcggagatggacgcggttgagacgaaccgcacttgggagctcgctgatctccctcatggtcatcgcgcgatcacccttaagtgggtgttcaaactgaagagggatgaagccggcgccatcgtcaagcataaggctcgcttggtggcacgcggtttcttgcagcaggaggggatcgacttcgacgatgccttcgcccctgtagcacggatggaatccgtgcgactcctcctcgcgttggcagccctgaagggctggcatgttcatcacatggatgtcaagtcggcgtttcttaacggcgacttaaaggaggaggtctacgtacaccagccgccaggttttgcgatccctggcaaggagggcaaggtgttgcgtctgcgcaaggctctctacggcttgcgacaggcaccaagggcgtggaatgccaagctggattccacgctcaagaggatgggcttcatgccaagcccgcacgaggcggccatctatcggcggggcaatggaggaagtgccctgctggtgggtgtctacgtcgacgacttggtgatcaccggcgccaaggatgcagaggtggcagcattcaaggaagagatgaaggccaccttccaaatgagtgacccggggcacctctccttctacctggggattgaggtgcaccagggggactccgggatcacacttcgccagaccgcctacgccaagcgcattgttgagctggctgggctcaccgactgcaacccagctctcactccgatggaggagaggctgaagctgagtcgcgatagcacgacggaggaggtggacgctacacagtaccggcatcttgtggggagccttcgctacctcgtccacacacagcctgacttggcatactccgtcggctacgttagtcggtttctgcagcgaccgacgacggagcatgagcaggctgtgaagaggatcatccgctatgttgcggggactctcgaccacggtctctactacccgaggtgccctggggaggcacaccttgtcgggtacagcgatagcgaccatgccggcgacatcgacaccagcaagagcacaagcggaatcctcttcttcctcggcaagtgccccatcagctggcagtcggtcaagcagcaggtggtggccatgtccagctgcgaggtcgagtacatagcggcgtccactgcttcggctcagacgctctggctggctcgactgctcggtgatctcctcgggagagacactggagcggtggaactcagggtggacagccaatctgctctggcattggccaagaaccccgtgttccatgaacggagcaagcacatccggctgagataccacttcatccgagcctgcttggcagaagggagcatcaaggcgcgctacatcaacaccaaggatcagcttgcagacctgctcaccaagccccttggtaagatcaagtttgttgagctttgctacaggtccgggatggcccaactttctcacaagacgacgcccaagacttagggggagaatgatggaataagtcttgagcatctagaggacagcctgcttttgactgtcatctgtagtcctttagcatctagaggacagcttgactgtcctctgtagtctatttagcatctagaggacagcagtcgcttttttgactgtcctctgtagtcgctttagcatctagaggacaacagtcgcttttgactgtcctctgtagtcgctttagcatctagaggacaatcctgttgtgtagtgtgtgtgagaaggtgtggtagtgcagcccctagggctataaatatgtgtccccaacccctctaagggtatgccattgtgtagtgtttgaagaataaacagaaaattgccccaactcatagtgtcatcctcttgatgagagttagagtccctctacttacagagccatctccagcggcaccggccgcagcggcactcctccaccttgatgagtcgaaagcacgcgttttcctcggcgacggctccaacaaggacatgatcgaaggatggtgcctcgacaccggcgccactcatcacatgaccggccaacgggagttcttcaccgagcttgactctagcgtccgaggctccgtcaagtttggggacgcctccggcgtagagatcaagggcgccggctcagtcgtcttcaccgccgcgtctggtgagcacaggctgctcaccggagtctactacatccccgcgttgagtaactctatcatcagcttgggacagctggatgagaacggttcgcgcgtggaggtcgagcacggagtcatgaggatctgggatccctctcgtcgccttcttgccaaggtacgcaggagtccaaatcggctatacatcctcaatgtgaaggtggcacaaccttgctgccttgctgctcgtcgagacgacggggcatggcagtggcacgagcgcttcgggcaccttaacttcgaagccctgaagcggctcagcgccaaggagatggtacgaggcctgccgtgccttgaccatgtggagcaattctgcgatgtctgcgtgttgacaaagcagagacgactcccctttccccagcagtcgagcttccgagccaaggagaggctcgagctcgtgcatggggacttgtgtggcccggtgacaccagccacaccaggaggacgacgctacttcttgctgctcgtcgacgatctctcccgctacatgtttgtgatgatccttggcagcaagggagaggctgcgaacgccatcaggcgtgtgcaggtcgctgcggaggcggagtgcggccgcaagctgcgcgtgctgcgcaccgacaacggcggcgaattcacggcggctgagttcgcatcgtactgcgcggatgagggcgttcagcgtcactactccgcgccgtacagcccgcagcagaacggcgtcgtcgagcggcgcaaccagacggttgtggggatggctcgggctctcctcaagcagagaggaatgccagctgtcttctggggagaggcggtggtgacagcgggttacatcctcaaccgctcgcccaccaaggctctcaacgggatgacaccgtacgaggcttggcatgggcgcaagccggcggtctctcacctacgggtcttcggctgcctcgcgttcaccatggagcttggccacatcagcaagctcgacgataggagcaccccgggggtgttcattggctacgcggagggctcgaaggcctaccgcattcttgacccaagaacacagcgtgtgcgcacggcgcgcgacgtagtgttcgacgaagggcgaggatgggcgtgggacaaggcggtggacgacggcacgactccgacgtacgacttcaccatcgagtacgtccaatttgagggagctgggggagtaggcaactcttctccgagcaggtctaccccagcccccaagtctccaccaactccagcgccacactctctagctcctgctacaacgagctcttcaccaccacgcactccagccacgactccggctacagcgagctcttcgccaccacgtactccagcaccgacggtaccctctccgggaacgtcctctccgacaccagctcgtgtcgagcacgacccagtggagctcgtaacccctctgtcccgcgacgaggagcgcgtcgacgcgtgctacgacggcgagccgttgcggtatcgaagggtggagggccttctcctcgacccgtcggtgccaggccctgcatctcgcattctggcgggagagttgcatcttgcatgcgacgatggtgagcctcggtctttcgcggaggccgagaaacatgcggcttggcgttctgcgatgcagtcggagatggacgcggttgagacgaaccgcacttgggagctcgctgatctccctcatggtcatcgcgcgatcacccttaagtgggtgttcaaactgaagagggatgaagtcggcgccatcgtcaagcataaggctcgcttggtggcacgcggtttcttgcagcaggaggggatcgacttcgacgatgccttcgcccctgtagcacggatggaatccgtgcgactcctcctcgcgctggcagccctggagggctggcatgttcatcacatggatgtcaagtcggcatttcttaacggcgacttaaaggaggaggtctacgtacaccagccgccaggttttgcgatccctggcaaggaaggcaaggtgttgcgcctgtgcaaggccctctacggcttgcgacaggcaccaagggcgtggaatgccaaactggattccacgctcaagaggatgggcttcatgccaagcccgcacgaggcggccatctatcggcggggcaatggagaaaatgccctgctggtgggtgtctacgtcgatgacttggtgatcaccggcgccaaggatgcagaggtggcagcattcaaggaagagatgaaggccaccttccaaatgagtgacccggggcacctctccttctacctggggattgaggtgcaccagggggactccgggatcacacttcgccagaccgcctacgccaagcgcattgttgagctggctgggctcaccgactgcaacccagctctcactccgatggaggagaggctgaagctgagtcgcgatagcacgacggaggaggtggacgctacacagtaccggcgtcttgtggggagccttcgctacctcgtccacacacagcctgacttggcatactccgtcggctacgttagtcggtttctgcagcgaccgacgacggagcatgagcaggctgtgaagaggatcatccgctatgttgcggggactctcgaccacggtctctactacccgaggtgccctggggaggcacaccttgtcgggtacagcgatagcgaccatgccggcgacatcgacaccagcaagagcacaagcggaatcctcttcttcctcggcaagtgccccatcagctggcagtcggtcaagcagcaggtggtggccatgtccagctgcgaggtcgagtacatagtggcgtccactgcttcggctcagacgctctggctggctcgactgctcggtgatctcctcgggagagacactggagcggtggaactcagggtggacagccaatccgctctggcattggccaagaaccccgtgttccatgaacggagcaagcacatccgactgagatagcacttcatccgagcctgcttggcagaagggagcatcaaggcgcgctacatcaacaccaaggatcagcttgcagacctgctcaccaagccccttggtaagatcaagtttgttgagctttgctccaggtccgggatggcccaactgtctcacaagacgacgcccaagacttagggggagaatgatggaataagtcttgagcatctagaggacagcctgcttttgactgtcatctgtagtcctttagcatctagaggacagcttgactgtcctctgtagtctctttagcatctagaggacagcagtcgcttttttgactgtcctctgtagtcgctttagcatctagaggacaacagtcgcttttgactgtcctctgtagtcgctttagcatctagaggacaatcctgttgtgtagtgtgtgtgagaaggtgtggtagtgcagcccctagggctataaatatgtgtccccaacccctctaagggtatgccatagtgtagtgtttgaagaaataaacagaaaattgccccaactcatagtgtcatcctcttgatgagagttagagtccctctacttacagagccatctccagcggcaccggccgcagcggcactcctccaccttgatgagtcgaaagcacgcgttttcctcggcgacggctccaacaaggacatgatcgaagaatggtgcctcgacaccggcgccactcatcacatgaccggccaacgggagttcttcaccgagcttgactctagcgtccgaggctccgtcaagtttggggacgcctccggcgtagagatcaagggcgccggctcagtcgtcttcaccgccgcgtctggtgagcacaggctgctcaccggagtctactacatccccgcattgagtaactctatcatcagcttgggacagctggatgagaacggttcgcgcgtggaggtcgagcacggagtcatgaggatctgggatccctctcgtcgccttcttgccaaggtacgcaagagtccaaatcggctatacatcctcaatgtgaaggtggcacaaccttgctgccttgctgctcgtcgagacgacggggcatggcagtggcacgagcgcttcgggcaccttaacttcgaggccctgaagcggctcagtgccaaggagatggtgcgaggcctgccgtgccttgaccatgtggagcaattctgcgatgtctgcgtgttgacaaagcagagacggctcccctttccccagcagtcgagcttccgagccaaggagaggctcgagctcgtgcatggggacttgtgtggcccggtgacaccagccacaccaagaggacgacgctacttcttgctgctcgtcgacgatctctcccgctacatgtgggtgatgatccttggcagcaagggagaggctgcaaacgccatcaggcgtgtgcaggtcgctgcggaggcggagtgcggccgcaagctgcgcgtgctgcacaccgacaacggcggcgaattcacggcggctgagttcgcgtcgtactgcgcggatgagggcgttcagcgccactactccacgccatacagcccgcagcagaacggcgtcgtcgagcggcgcaaccagacggttgtggggatggctcgggctctcctcaagcagagaggaatgccagctgtcttctggggagaggcggtggtgacagcgggttacatcctcaaccgctcgcccaccaaggctctcaacgggatgacaccgtacgaggcttggcatgggcgcaagccggcggtctctcacctacgggtcttcggctgcctcgcgttcaccaaggagcttggccacatcagcaagctcgacgataggagcaccccgggggggttcattggctacgcggagggctcgaaggcctaccgcatccttgacccaagaacacagcgtgtgcgcacggcgcgcgacgtagtgttcgacgaagggcgaggatgggcgtgggacaaggcggtggacgacggcacgactccgacgtacgacttcaccatcgagtacgtccactttgagggagctgggggagtaggcaactcttctccgagcaggtctaccccagcccccaagtctccaccgactccagcgccacactctccagctcctgctacaacgagctcttcaccaccacgcactccagccacgactccggctacagcgagctcttcgccaccacgtactccagcaccgacggtaccctctccgggagcgtcctctccgacaccagctcgtgtcgagcacgacccagtggagctcgtgacccctctgtcccgcgacgaggagcgcgtcgacgcgtgctacgacggcgagccgttgcggtatcgaagggtggagggccttctcatcgacccgtcggtgccaggccctgcatctcgcattctggcaggagagttgcatcttgcatgcgacgatggtgagcctcggtctttcgcggaggccgagaaacatgcggcttggcgtgctgcgatgcagtcggagatggacgcggttgagacgaaccgcacttgggagctcgctgatctccctcatggtcatcgcgcgatcacccttaagtgggtgttcaaactgaagagggatgaagccagcgccatcgtcaagcataaggctcgcttggtggcacgcggtttcttacagcaggaggggatcgacttcgacgatgccttcgcccctgtagcacggatggaatccgtgcgactcctccttgcgctggcagccctggagggctggcatgttcatcacatggatgtcaagtcggcgtttcttaacggcgacttaaaggaggaggtctacgtacaccagccgccaggttttgcgatccctggcaaggagggcaaggtgttgcgcctgcgcaaggctctctacggcttgcgacaggcaccaagggcgtggaatgccaagctggattccacgctcaagaggaagggcttcatgccaagcccgcacgaggcggccatctatcggcggggcaatggagaaaatgccctgctggtgggtgtctacgtcgacgacttggtgatcaccggcgccaaggatgcagaggtggcagcattcaaggaagagatgaaggccaccttccaaatgagtgacttggggcatctctccttctacctggggattgaggtgcaccagggagactccgggatctcacttcgccagaccgcctatgccaggcgcattgttgagctggctgggctcaccgactgcaacccagctctcactccgatggaggagaggctgaagctgagtcgcgacagcacgacggaggaggtggatgctacacagtaccggcgtcttgtggggagccttcgctacctcgtccacacacgacctgacttggcatactccgtcggctacgttagtcggttcttgcagcgaccgacgacggagcatgagcaggctgtgaagaggatcatccgctatgttgcggggactctcgaccacggtctctactacccgaggtgccctggggaggcacaccttgtcgggtacagcgacagcgaccacgccggcgacatcgacactagcaagagcacaagcgggatcctcttcttcctcggcaattgcctcattagctggcagtcggtcaagcagcaggtggtggccatgtccagctgcgaggccgagtacatagcggcgtccactgcttcgactcaggcgctctggctggctcgactgctcgnnnnnnnnnnnnnnnnnnnnnnnnnnnnnnnnnnnnnnnnnnnnnnnnnnnnnnnnnnnnnnnnnnnnnnnnnnnnnnnnnnnnnnnnnnnnnnnnnnnnnnnnnnnnnnnnnnnnnnnnnnnnnnnnnnnnnnnnnnnnnnnnnnnnnnnnnnnnnnnnnnnnnnnnnnnnnnnnnnnnnnnnnnnnnnnnnnnnnnnnnnnnnnnnnnnnnnnnnnnnnnnnnnnnnnnnnnnnnnnnnnnnnnnnnnnnnnnnnnnnnnnnnnnnnnnnnnnnnnnnnnnnnnnnnnnnnnnnnnnnnnnnnnnnnnnnnnnnnnnnnnnnnnnnnnnnnnnnnnnnnnnnnnnnnnnnnnnnnnnnnnnnnnnnnnnnnnnnnnnnnnnnnnnnnnnnnnnnnnnnnnnnnnnnnnnnnnnnnnnnnnnnnnnnnnnnnnnnnnnnnnnnnnnnnnnnnnnnnnnnnnnnnnnnnnnnnnnnnnnnnnnnnnnnnnnnnnnncgagagctgtctcactgagttgtgagtttgaagcagtctttccgcatttgcgcggggggggggtgatggaataagtcttgagcatctagaggacagcctgcttttgactgtcctctgtagtcctttagcatctagaggacaacagtcgctttttgactgtcctctgtagtctctttagcatctagaggacaacaatcgcttttgactgtcctctgtagtcgctttagcatctagaggacagcagtcgctttttgactgtcctctgtagtctctttagcatctagaggacaatcctgttgtgtagtgtgtgtgagaaggtgtggtagtgcagcccctagggctataaatatgtgtccccaacccctctaagggtatagcattgtgtagtgtttgaggaaataaacagaaaattgacccaactcatagtgtcatcctcttgatgagagttagagtccctctacttacagggggagacttgtctcggtttatccctcccttagaccccactcatgtgggagcctccgacattggatgtactctatttgttttaaatatatgcagataaatattattttctaacaatggtgctaattcatgtataaaagtaaggagtaaaatgcatcaggtccccgaactctcaaaactaggattacgtgtcttcgaacttgacgtcttggccggtcatccaaaaccagatttgctcaaactggatgccgatgtggcgtgccatgttggagtcactttggtccccgaacttggcatgctgtatcacttgggtctcagaacttggcattttgtgccacttggcttcccgaactttctttagtacgcttcagcgtggcatgctacgttggcatcgggtttgaacaaactcggttttggatggccgactaagttcgaggacccgttttgctggttttgaaaattcgatgacccaagtgacaaatcatgctaagttcgaggaccactgatgtattttactcaaagttaagttttgggatgtgtttattgggctagggcatgctagtggggtttctctcgttgcaaaacaggggcttgtttgcaaatagttctaaaggcaccttgtgtgtgaaatgtgggttctgtgtgccaatgtcaacaagttttatggatcttgattatagatcgaattgctagaaatatagtagttcaaacagatattggaactggagctacaatttagtcattaatatactattacttcaagtatgtatgggtatcaactatcaaacataggttgtgtttgcttcagcatctgaaaagtgcttctgctctactttattgtattacaatttaactagcaccttggactatacttttggcttccaaccttttacttctccaaatggttggaaacagaaagaaattttacatgtgtatccagggcatgcttatcaagacgtccattaagcgtcacattagagtcgctttagcgctaaggcgcactcacagggcaaggcgtctagcttgccttgtgctggggagtaagacgtccgccgcggcgtaaggcgctggtggggcgtcggcagggcgttctcggagcgtcggcggggcgacgcttaggggataggtagggttttgaagggcgacggctggaaacagagaagagggtttgacctgtgtctgtgtggcagctgcagctgctgcctccttcctcgtcggcgcgcagtgctccggccatcggaggtgggagactgcggtggaagaaccgagggagagagagagaggagagctgtgggggagggagagagaggggactgaagagagatgcagcgtgagggaaaaatagaggctggcggctgctactaggttgctggcggctgtgacctaaaactgtgttttgggctgagctgggccgagttgggctggactcacttgttgtgaggttctttcctgccttttttttctgcttctactagactgaaattggacatattagaccttataaaagtgctagcttgcttattaactttaaattagtgatatataaataatgtttgatctaatttttttgatatttatctatataactaaggcctcgcctcgccttacgctttatcgcctaaaagataaaagagggttggtcgccttatgtcgccttaccgccttaataactatgatcaagggagagaaagaaaggggtaggcttcatagttgtttcaaccaaacaatttatctttttcatagtgcatagctcacatcatcttttccaaagctcacaactcacaacaacttttctatagcttagttgacccaaacaagcccataattgctttttgtttggacctaccagctaattactcatgtgagagcctctgacactaggtttgtcctactaactaactacacaacacatcataggtacgtaacctttagctctctagaaaacttgggcaagtaattcagccaccctgaaatggtgctctataaatgtctcggcttgccaaattttgtttgggccagccaaaatttgacctccaccttgggctcaactctctgaccatattgggcgcttggatcatatggaatggaaccactgtaactgttgttttattgatttttttctcgaaaagcgcaggagaactgcaccccattatattaagaccgttgtttttattgatgctaagtgtttctgaagccatgatcgtggcaggagaagagcgtcaactttggtctatgacaggggctagaggaatctcctgcttgattgtccccaaggttttgagtgcttttttagatgggacattctatgtctcctttttaatcagtgtgtttgtaactattaaatgtggtgtttgttgtgtgggttgtggttcctaaccgaatttcttcttaatataataaagtgccatctctactgcattttcgagaactttttttgacctccaagtggttgccagattgttggggcacgaccaaattttgattttgcatcctatgagtctcatactaaacgtgtcgtgaatatccttgttttatccatgatcattcatttattcatttgcttgtgccttctgtgtagacatgttttttttgcaggtatatgtgtggttgcacactcataagttgcagttgctactaccttgttagttagtctatggttttgctgctttgattgaaccaaaataaaatgttagttgcaaacttttgtcaactcagctgtgtctgtcatttgtttagtattgtcctccattatcattaaggatcagagactttgtaaatggattagtttttcatgaatgttatgatgaaaaatgatattgttctgttctttaaatatattctttgctcgcaacttatattaattgtccttgggctatgttctcatgtctattgcaggttgaatgtttacttgtagaaggtgtcttgggcaaaaggaatcttgtgtattgtgcatccacgaggtgtttgcagatctttcatgtcgttcatacatggacatacctacacacttcacattctcagatgcgtactgtttttttttcaaattccttttctatctaatcttatgtgtatattttttgttgttaaatttgcagtgctggtaaaagttttgttgctgaagttctgatgttgaggcagatactgtcaactgggaatatggcaattcttgtccttccctatgtgtcaatatgcgctgaaaaggtttttgatgatttatacagctttggattggtctgaaacatacttgtgtttgattatttatttatcttttacaggctgaacatcttgaacaacttcttgagccactgggtaggcatgtccgtagcttctacggaaaccaggggggaggctcacttcctaaagatacagcagttgctgtatgtaccatagagaaggcaaactctttggtaaacaagttgttggaggatggccgcctctctgaacttggtgtaattgtcatagatgaacttcatatggtaagcttgtctaaaaccgaagtgctgctcagaacatcctctctttgctttaaaccttttgttgttggtactttcatggttatttataccacatctattttgttatgcaagttcattgccttaggaactgtcatttcagcaatctaggtttgtgacagcattgagagtactaacgtaattttgtaacatttccattgtttgtaatcttttaatagcatgcacgagataattgccatttaatgaggatatttgttggcctgttgttagctattagtgctccttggccagtgtgcattgtggaattggatttgttttatgaaacagatggagcactagagatctggtactatctggaatctaaaaagtagagcgtgtgcattttgtatgactttcttctttaattaatacaatgatacagaactctcctgcatattgaagaaaaaacgatgtacaattgcattgcaagtagtagaggttttatcattgctaactaagagcactacaaattcttgtataggtggtgtatgtggtattggtgtactgcatatatcaatcagaacttcaaatatgatttttcctctcccccttctctccgcctgggccgttagggagtgaattcagtccaacgcctaggggctagggccaccaatctagtccaagtgatgtacctttccctactgcatcattgtttagttttttaggtgttcttttttgttcaaggtttgggatggttagtcatcaacttatcacccatcctatctaatcaagtaatcttgtgtgttactttacctgttacccgagtttccatattgttaggttataatcattaagagtaatttgtaaataagaaaggtttgtcattatggacaattgccagtaaacaagaaacaacaaggagaagtaccattggtcctggcgctgaatgaattctggcagcatacttatcaaatgcaaatcatataggaagatttgactttccttagggctcccctcatatatttgtaatattaggcccaggaccaatagtctcccagctcgccattcggctaaagcactatggcagtattactatttagcaacccctaccaaaggaagcatatagcttgcatctttacctgtctttgtttacctttccatgcccttgagggttctttcaatctttcttcctgtatcctttgacttagtttgtcgaacatgatgtgatatatagttgaaacttgttaagttctccaattatgcaattaaattaacaggttggtgaccaacatagaggatatcttttagagctgatgttgacaaagcttcgatatgctgctggtgaagggactttacagtcatgtagcggagaagtttcaagttctagcagtgggaagattgcaagtcatgggttgcagataattggtatgagtgctactatgcccaacatcgctgcggtggctgattggcttcaagtaagatatttaattctcctagttttatgtacttaatgaagggatgttttactagtgtgagaaacaacattactaacccacagaagttcaacttagcattgtcgttcatttatcatattagaaagttcaaaggcatttgataaatatgtgagcaattgaacttcctaattccacttgtattttctttcatcaactttttaaggttttttttgctgtctttcttcaaacctatagcctaacatgatatcttcatcaatattatctgatcgtatgatcgaggctactcgtatgaccaccgatcatatgactaatcactattagtcatcgattagttggtctagccagctagtcgaacatttagttgtccatgtgcctagatgacctaatcgaccatgccgagttagtatccatcgctagtctccttcgcgtcgccccacatgggcaacacgggcggaaccaaccctagcaacgcaccttcttcctcacctgattctcctcaccgtcactagagcgcgacttcacaaggaaggcaatggcatgtcattctcctctgcctcgtgatcatcgactctatcaagctcctctaccatggtttgagaaggtgctcctcccagtggccaatctctagattctagatccaccgatctctaggccagacctgcgctggttgggcctatggtggccacacagtggcagtgcagttgtcccctctcctctcacaactcttcgttcgtctttggtgggtgatgcctagatccatcgtcactgtagccggatcaggcatctcccgtgacaacggatctgcggagggcgacaacccttgtggtcccaacttcattttcaagcatgttcgggtgcttctcggctctagcactcggtcaactttggcttggcattggcatgtggcgcaaatgcaatagcaactgcattgctagcttgcatggccaccaaggatgggtgctcttagtgaggcaaacaagtgccaaacctgcaaccatgacataggagatggtgggcttgctcaggcttgcgttggtgtttgtcggtacctcaagactagggtacccactcctactggatcaaggcgggacccctgtggctatccctagtcgcatagccacaggtggtccgccctggctcagaatataggttcgtccgacgaggccgctggcctcaggtgggggccaacttccatgttgggctcttcagatccctagcagcggggctccgaagccgccacatgctccaagtatggggactccctacagctttgcctaggggcctgaccccctctgggtggtcccggacacctgcgtatgctacttgaacctccgacttaaagaggtccggtattgccacgtgtttaggcccgtgccagagggtcccggactcctctgagtaccttccgaacccccaactagtggtgctccggatctgccacgtctacagacactcctggctgattgctccctgctcgggtaaagatccggtgctgccacgtgtcttatggcgtgtgacataagccgtcgggaagagcctggcgtaagcctctggcaaggggaagggccacctgtgttcaaggcgggcagagtgcgcggctgttcacacaagtaatagatggcgcgtaccccgcattaaatgtaggtggcgtgcgcaacctgcaaggcctgcccgcgtcagaatcgcgttaccaaggcaagcccattgcgtagcttggacgcccttcattatgacttctattcctcgcgtgttattgaggcatgagggaacaggcggaggggacgggatgacaccgtccttattctccctacgctcacctacgccgcaacctacgttgtagcctttgcccacatgtcgtagcccctcctcatcttaggattagggcgggtgttatccgtcacctgtctggagtttacctctgaccgtgttgatgtttgtgtggttcgtctctaggtggtctttatagggcacgacaaccatggttggctacaacgagccttgtttgtgggcgtagcttttcacctgcaatggctctgaactagctcgagagttgcatgcggtggtggacgacaatcaacttcaccaggactacatgagtaactatgttgactacacatgttggtgtgaggagagatcttggtgcaagatttggttagtattatcttgagtcgatgatgataacacctttggggggggtgccattcccttttttggaagcgtcgatgaggtgccgtctctccttaccccacgatttgttttgaagaagctctgcctagggtccctaggctggtgatggcggcgcccagcgtcgtatcctgcctgagggcatcaccttgatcccgtactaccatggttgttggtccgcatgggacatttgctgcttgtttgtaagcctcaggttttgatgagttcgctacttgcttaaagcatgtcttttgctctcctagggtagatcaataggtgaagtcagagctgcttttgtggggtgcaacaaagcttggcaatgatgacacattatgttcacttccttcaaaagccgggtcttgttgtgagtaggtggtggtgtgttagggctttggctgatgttcgttgtgggaaatcagatctacgtatcacttttgtgggataagctcgacatcgatgacgtgtggtgtgctctgttggttgtttttgtgtatgtgggttgcttaggattagtcgtatgggttgttgtgtttaggtattggccggttttcctttgataaactgtgtgatgtggtgttttatccctgggtttccttataacctaggtcaattctatttcttaattgaaacttcctagttcctactgcgttaaaaaatgacctgatcaaccatgtatataaataaatttgatataaattggtgaatgggagaggcaagcaaccaagcacattaataacatttccaccttcctctccggcgcggacgtcgcccacctctacgcgtctagcatcgccgccgccgctactacggctccccaggcgttcaccgtgaccaccgccgctgctgcagccactgcggctggactcctacccccaacctctatagcagcctcgacctccctggctacctgacctccacggccgccttcagtgccgcctcgacattcgggactctctccccgaccgacttctcccggcagtcgcccctcggtttcaccgcccgcctgtcgtcgacgtcacttgggctccaccacgtgccgtcgcgccgtccaacgactccgccttggtcgctgccatcgccaccatccaggccgccgtggccgcctcacaggagcgccaacgcgtcgcattactccctctggagcaggaatgggccatgggttaggccctgaccactcagctggccacggctcagcgtatgcttctcggtcgtggcaccccgccaccaccggcagtgcttgcggctcccctggtggtcccggagcctcctcatggctctgggcttgacgtcgacactatcgccgccctccacgcctaggccgctggggttcacaacatacagtccctcatgttggacccgacgtcctcccactaacctcactggcgcgctcaggtggtcctcacccttcggcgtttgccctcactgaccacgtcctcgacgatctcgttgcctcgctgtccccctcctgggtctagatggacaacgtggtcctatcgtggctcaacgacacaatcaccgttgagctgcaggacatcgtctgtgatcaggcagacactgcgcgccagacatggcttgctctcgagggccagttccccaggaaccaggaggctcgggtgctccacctcgacgtccagttccatctgttttctcaggggacctctctgtgggagagtactgccgccagatgaagggcatggcgaactctctccgcgacctcggtgagcctgtcgccgacaacaccaaggtgctgaaccttctacgtggcctcagcccccgctacggccaccggaaggctctcatcaagaggaccgtgcctcaactcccgctatggtcctctcatcaagaggaccatgccgtgcggaacgagcttctttttgagtagctcaccatggagaccgaggctcctccggcatcgacactctacaacgctcctcccggcggtcagacaccctcggggggccaggcctctcgctctccatcgaccgaggcccctgctcgccatccacccgctgtcattgcgactcctcgtccggctttcaccgccgacggaggtcgtcgctccctcaagggcggccgtggggtggcagctccacccgtggtggtccctccggccggggtggcggccaggcgtgaccgtcattctacaacccctggaccaggaccatcgccatgtggccgggctaggcctcgagtgcctcccgctttccggcgtcggccctccagacagcgcctccctacgacgtgccttcgatgcctccctacggcgtgccaccaacgcctccggccgcgccctagcacccgccccgaggaccaccacctcgacgccttggtccccgctggctggcggatggggccctgcatccctcgtcaccgccttcagcaccatggcgatgaccccaccccctccgactgggtggttgattccgagcttcttaccacacaactcccactgcagacacgctctctttgtcccatcccatccattcctcccacccctcctggatcctcgttggcaacgataccactttgccggtcacctcaataggtgcctcggttttccctgggccgttctatctcaacgacgttctcgtagcccctcacataactcacaatcttctttctgttcgtcggttcaccaccgacaacttttgttccattgagtttgacccctctggttttctgtgaaggatctagccacatgacccctctcacccgctgtgacagcgccaagcccctctacacgcttcggccttccaccaccgacgcgtctccacctcccgtcctggtctccaccaccacctctaccacgtgacatcattgtctcggccacccaggacctgatgtcatgaccaaacttaacaacaatttagatccttcatgtagtaggggacattttgatggtctctgtcatgcttgtcagttagaccgacatactcgtctcccattcaccactttttggtttgaggagtcttttgacctggttcattgtgatctctgtacctcccctatactcaatctctttggttataaatactatttggtcattttggatgatttttcccattttctttggacctttcctcttcggttgaagtccgacacgttcaccaccctcacacacttcttcacctaggtctccactcagttccgtcgcccggtccgtgccctacagtgtgacagtggccgcgagttcgacaaccatgcctcccgttctttctttctcaccaacggcgtccagttgcgtctctcgtgcccctacacctctttccagaacggccgggccgaccgcataactctttctcaccatttgctgccttctcttccaggcgtctgtccctgccagctactggggtgaggccctacacaccgccacacaccttctcaactctcttccctcgaaggcggtgagccaccctactcccacttcgccctgtacgacacaaccccttcctacgaccaccttcgcgtgtttggctgtgcctgttatgctaacacttccgccatcgctcctcataagctatctccttgctccactcgctgtctcttccttggctagtcccctgaccacaaagggtattgctgtcttgacctcagctcgcaccgtatcatcatctctcgtcatgtcgtcttcgacgaagatgtgtttccttttgctggctcctcccacccaccgatctcgactccctacttgagtctgatccggttacccctctataagtagatggactctaactctcatcaagaggatgacactataagttcgggcaattttctgtttatttcctcaaacactacacaatgccatacccatctaagggttggagacatatttatagccctagaggttgcactaccacaccttctcacacacactacacaacatgattgtcctctagatgctaaagagactacaaaggacagtcaaaaagcgattgttgtcctctagatgctaaagagactacagaggacagtcaaaaagcgactgttgtcctctagatgctaaagagactacagaggacagtcaaaaagcgactgctgtcctctagatgctaaagagactacagagtacagtcaaaaaacgactgttgtcctctgatgctaaagagactacagaggacagtcaaaaaaacgactgttgtcctctagatgctcaagacttattccatcagcctccaccctaggcgtcccgccttgcgccgttgcctgtaccatgtgcggcctcgacgcctccactcgcgcctctaccggcgcggcgacgacaccgtctacctcctgctctacgtcgatgatattgtgccgacatgcaccgtcgacctcctacagcgcacgatcgtcggccctcagcggtagtttgcgacgaaggacctggggcccctccaccacttcctcggcatcaccgccgaacgctggtcccagggtctcttccttcaccagcgccagtacgccatcgacatcctggagcgggctggcatattcgactgcaagccctgctccacgcctgtcgacacttaggcgaagctctctgaggacggcggcccccggtcgccgacgcgacgtcttaccggagcctgaccggtgcgctccattacctgaccttctctaggcccgacatcgcctacaccatccagcaggtgtgcctgcatatgcacaccccgcgggagccccatctcaccgctcaagcggatcctgtgctacctccgcggctacctcgactacgacctccttctccgaccatccccgacgtcggagctcgtggtctacaccgacgctgactgggccgattgtcccgacacgcgccggtccacttccagttctgccgtgttcctgggcgccaacctcgtctcctgggctgccatgcggcagctcgtcgtctcccgctccagcgccgaggtcgagtattgcgctgtggccaatggtgtggcagaggcctcctagatgcgccagctactacacgagctccacatctctcttcagcgcacaaccctcgtctcttgcggcaatgtcagtgcggtctacctctccaccaaccccgtgcatcatcagagcacgaagcatgtggagatcgacctgcagttcgtccgcgagcgtgtcactgcctgtgacgttcgggttctcagcgtccccaccacgctgcaatacgacgacatcttcaccaaggggttaccgtcgagtgtatttttagactctcgatctagtctcaacatctgatctgtacaagatagagttgcgggggggggggggggnnnnnnnnnngcagattttaaaataaaggtgcacagatttgcttcagctctcttcgcagcctctgtgtgttcggtggttggtaatggggcaaacactctcttctggacagataaatggcttcagggccaatctttgctccagattgcccccgcgctaataaatcgggtgcccgcgaatataagacggcgcagatctgtccaagcagccttaacagccaatggttgggtgcatgatatctctggaagccttacggcgcaggtgctgtttgaatttttattggtttgggatttactccaagaggtgcaactgtaccctaatgtggaggatcaacatcggtggttgccatcctcctcggggctgtattccgccagctctgcttatttgcgcttccatggtggtgcaacaacctttgagcctgctacaagaatctggaagacttgggcccccccgcgctgcaagtatttcatttggcttgcatctctcaaccgatgttggacggctgatcgactggcacgtcatggaatggatcatccagatagttgtcccttgtgtgatcagcaggatgagtcagtgcatcacttgctggtggattgtgtttttacgagggaagtttggtttacaacactaagcaggctaggtttgcaacatcttgctcccacgtctgatgctacannnnnnnnnngggggggggggggtgttagaattccatttacggtttggggttctcctcgtgtaattactctctcacccctgtgtaatgggccatgtcctgttaactcatgtctattaatacatcacccaaccccaagatagagttagggtttcccacactgtgtaatggactaggcctaacaacctgggtctattaatacaactcccaaccctgagttagggttaggttttcccacatgtaatagaggtaggttagtttctctcccccaccccatcccaaccgcccgcttctttcccagcctccggtcgccgtcagctgcatgctctagccgttgtccgccgtgtgctcctccctgtcgtcacatcctgcagccgccgaccccgccatggatcctccccaatccgtccctcccctctccttcgcgctggatgctagcgcggacgccgggcttggtgcgacggcagccgacctcgacatgcgcgccaccgcggccctcgacgcatgcacctcgcccgcgcaccgccgcgaacgccgccgccgtgtacgccgccctaggcgtgaccccctcatcggctgatctgcacggcgccataggcgtgtgccctcccttcgctagctcgctctttccccatggctcgtcgacccgctgcgctcgctgttggcccccctacatcgacggcctcgggcccctccgcggcgcctctcctacgaccttcgctgcacaacagcgccaaggttctctgcctggcttcctcgccctcgctgctcctacatggaccgaggacgtcgcttcctcgtcaggctcctccccaacttcctcgacattggttatggatatcgccaccatccaggcggctgttgcggcctcctaggaccgtgagcgcgccacgactcttgccttggagcgcgagcgcgccatggtgccgacttgaccacccagatggccgtcgcgcaacgcctcctcctcggtcgcagtaccaccccttcaccggtggcccctgggactccccatgcccaagggcttgatgctgacaccatcattaccctccatgcttaggtcgccggggtccacaacattcggtccctcgtgtgtgttatgctggacctggcgtcctcccactaccctcggtgtcgcgcttaggtcatcctcacgcttcggtgatactcccttgttgaccatgtcctcgacgaccccgtcgttccgctgtcaccttcgtgggtacagatggacaacgtgatcctctcgtggctcaacgacaccatcaccatcgagctacaagacatcgtccgtgactaggcgaacaacgcgtaccaggcgtggctcgctctcgagggccagttcctcgggaatcgggaggctcgggcgctccatctcgacgtccagttccacctgttctctcagggggatctctctgtgggagagtactgccgccagatgaagggcatgacaaactctctccgcgacctcggcgagcccatcgccggccatatcttggtgctgaaccttctacatggcctcagcccccgctacggccacctgaaggctttcatcaagaggatcgtgccttttcccacctttcatgctgtgccgaacgagcttctcctcgagggccccgccgatcacatctacgccgcatgaagcacgtgcagcatcagcacacggagcacatggagatcgatctgcactttgtccgtgagcgggtcaccgccggtgacgttcgggttctcagcgtccccaccaagctgcagttcgccgacatcttcaccaaggggctgccgtcgagtgtcttcgccgacttccgatccagtctcaacatctgtacaagatagagactgcggggggggggggnnnnnnnnnnnnnnnnnnnnnnnnnnnnnnnnnnnnnnnnnnnnnnnnnnnnnnnnnnnnnnnnnnnnnnnnnnnnnnnnnnnnnnnnnnnnnnnnnnnnnnnnnnnnnnnnnnnnngggggggggtgttagagtactgttagggtttcggggcttgtccctgtgtaattacttgcataccctcagtgtaatgagcttggcccatatagcactcccaactcagttagggttagggtttcattctccaacagttttgttcattatgagcacattttttgtcgacttgatttgttaatagtaagttattctgtgaaggtgctaacttttgatctgtttgggtaatatgaatgatttatagttgcatacctattataattgacgctatgtaatcttaggctgctctttatcaaactgactttcgaccagttccactggaggaattcataaaagttggtaatcaaatatttgataaagacatgaacgttgttcgtgtccttcccaaagtagctgaccatggtggcaaggatccagatcatattgttgaattgtgtaatgaggtaaatctgttatttacattgcaggtcttagtttttctctgttaaacactacaattttgaagcaaattgaatattgtacttgtatttgttccaggttgttcttcagggccattctgtgcttttgttttgctccagtcgtaaaggctgcgaatcaactgcaaggcatgttgccaagttcttgaaactaccctctgttggaacaactgatgttagttcggagttttcagatgctgcagctgctattgaggccttgaggaggtgccctgctggattggatccaatattgggagaaacccttccttttggtgttgcatatcatcatgctggtcttacggtatggaagctatcttctatcttcataagatacacaaaatatcaaatatatatatatatatatttatttatttgaaatttgcactgctaaatatgtgctaagtggtgagagtggtctcactaagccaccaggtcgcgggttcaaagcaaccccttcacatttgcgggggaagggttgccttggttttatcccttccctagaacttactcacatggcctccgtcactgggtctgccctttacactgctaaatttaataaagtgatgccatttttacctaaccacagctgggcaaagggtggtaggaactgatctgccattacctgttctgattgatccaatgagcgtcatcgccttctgttctgtggcaggtcgaggagagggagattgtggaatcatgctaccgtaaaggccttgtccgtgttctgactgccacttcaactttagctgctggtgttaacttgcctgctagacgggttatattcaggcagcccaagataggtcgtgattttattgatgggactcgctatagacagatggctggtcgtgctggtcgaactggaatagacacaaaaggagaaagtgtaagctacaatatctttgttccactttattctattagagaatggttctgacatttcactagttctgttttaattgtgtttttaactttagcctaccccaactgcttgggagaaaagggctttgttgttgttgtctaataatctgacatttgaaatgcatgcagatacttgtatgcaggcctgaagaggtcaagagagttacaggtattattagaagcaattgccctcccttggagtcctgcctctcagaagataaaaatggaatgactcatgcaattatggaggttgttgctggtgggattgttcaaactgcaaatgatattcatcgttatgtgcggtgtacgctgcttaattccacaagaccttttgatgatgtcgtgaagtcagctcaagactcccttcgttggttatgccataaaagctttcttgagtggaaccatgagaccaagatatactccgctactccccttggtagagctgcttttggaagttcactcaaccctgaggaatcattggtagcatacttgtcttttgctccttcattattttattgcattgagaaagggcctctagctgagttggttaggtggtctgagtagcactccttaggttctaggtttgactttccgtgggagcgaatatcagcctgtggttacctcccatttgtctgtcccacaccaaagcacaggtctaaggtcctgtctagatcgtagtcgtttctcaaatgggctacggtgccgctgtgtatgggtggggcaggggttcgggggttttctcgacctgcgtgagaaggtcttcttaatataatacccgagggctgtcttatcccccgcaggtcgagttttttttttattttattgcattgtttaatcttgcatttttctgtttctgcactaggttgttcttgatgatctttcgagggcaagagaaggctttgttctggcatctgatttacatttagtttacttggtcacacccataaatgtagaccttgaacctgattgggaattatattacgagaaattcatgcaactttcttctcttgagcaggtatgcaagtcttcttttgtcctattgcacttgaaagttcatttatcaaactgtaaatagaatatccagaaattcgagttctatctgtactcattagaaaatagttgaaagtgaattccgaaaacatgattttagttgctgttgaactaaatgtgtgaagcaaaagtgaattcagaaaatgcaaatcaaatttgttacggttataatagtcataatattagtgtaatcttctagtctagggtttccctcatgtttctcatgtactcttatagtgcttattcatccaattcagtgcttgttaatggaatgtgtgaagtctatttcggtatttttacataaccatgaatcagactaaaacatgcatatgtttattgaactccttcgcactgtacttggttgcagtttactacatatgttatttgacctggttcataagatttttttaggagttgtcagttcttattagttttttgtaattcccatgttttctttggcccaacaagaaacagaacaactgacatgataccatgttttctgcagaacattaatcttttatcagtggtattatcattagtgccaaaatgtttataactgtatgccatgtctaccctactaaggcctaagactgtgtccaacactgttttgcactgttcacagagtggagccaaatgtgttcgcttgactttaatccgtaccggcttctattgtttctacagtatttttgtctgtatagattgcagctacagcagtccaaacagttggctttaatctgcagtagctacagacccttttggacttgcgcactgctcatgcgaaaagtggatgcgttactgttcatgtcgggtcctgggtttgttaagacagatattagattagatcgggttgacttgttggctatttctttaactctagaaaatagttaaggatcaaatctacacatctctattgggattgtatctactttgaattaagtaagaaatagatagttcaacagttcctatctggctatctacctccttaacactggctttctcgcatggccaacatgaagtatgcctgtgacaccgtatctttctgccatattggttgagaaatcaaaccattacttaaattatcaacttcagttcagttcatagaacacataatttcactcatttttttaatttctgtttgttttgttggtacaatgcagtcagtaggcaatcgggttggagtaattgaacccttcttgatgcacatggctcatggggcgtcgataccttttcgtgcaaggcctcagagaaacaccgggttaagtaacaagtctgcacaagctgctggaaatactcttgttagtgagcacacaatcagagtgtctaagcgcttttatgtggctttaatgttatcgaggcttgctcaggtataatctaagaactacttagacattgcatgttagttctatgtcaatgcatagtgctcaagatcgctagaaagcctaagtcgtgaaatgtaaaaaatagttcaatagagattagataatgaaggttgaaatgttctctcattatatatggctaattaaaatattagctcatgtcttatatttttgtagaatacacaagagagctatgtatcatttcattgagaagggtataaataaataagttacaacacacccaccacactcacacatatacacatacaaacttgtactggaaacaattcacaacacacccaacatgccttttgcatcagaacaagacccttgggtgggcatttggggaactaaaaatttgtgggtactagaaattgctacccaatttcgagtttcgacctcgaaaaagcattagccaaaattttagatacttgataatttgagttccagttttacttggtgtacctgataattccagtagcattttaaagtaagaaacaaaagtccatcaaatcatttcatatcaattaacaagaaatcaattatcaagatagtacaaatctacattgagccataccaaataatagatttacactatactgaaccactccatatcttcatattagaaaatagaagaacaaaatttttgagatattttgcgtaattcgggtataaatttacccaaactacctgaatggaattcagttttctatagctactattacgaagatggtttccatggtgacctgctagatgggctatatgggcgactcagtttgtgggaatcttatccaaggtatcaaaggtgggacgacaaccactcgaccagccgtgtttccacctgtgaattccttcacgatatgcctgccatctatggctatggcctcgcgccacctcccttttatcaaaccacgcgagcaacgtccctcccatcgggttttcaatgtttatactcgtttgtcaaaaaggaaaatgctctcttgctcagtttcttggcaacatggactttcaagaaaattttcagacacctttttggctctttctatggaagccaccgaagaatacctcaagttctatgatacaattatttcagttcaaaacaacatgcaaggcaaggataaatggatctattcttggggaaacaacaatctacgttcaagcaagatttacatattaaacttacaatccatgtacccaccttctcctttcaagtggatctagaaatccaaagtgagtaaaaagatcaaggtgctcatttggctgaccttcagagacagaatcaactcaagaaattttcttcgaagaaagatgtgtacaattacaaatgatgattacaaccatgttctttgtggccttaattgtgaggaaaccacatatcatcttttatttgaatgtccattcagtacattgtgctggaatcatgttggtattcactgggatcaccctttggatttttttgaaatgaccatatctgcgagggatcaattcagtaaaaatttcttcatggaaattctggctgttacgacctgggagattttggaagcaaagaaatgctgctatcttcatagattcctttccatcttttacgtcttggaggttttgcttcaatgacacgttggggctacaaatgcatagaatgaactcgaatcttagcttgtcgatttccttgtggcttgcttctttattttctttacttctatctccatttgcttctattcttccttccctttactgtacatttccttttttatttaatatataccactgtatgggccttccctacagtttcatcggtcaaaaaatgtccctccaatgccctccctactgccacagtctaccatgccacaggttgttgcagcactaccatgcgctcccaccatatcttgcccaatttcatgtgtatttacaagaatttactggtataagttgctgagaaagtttgggttacacagtttgacccctgagccaggacatacatccttcctagactggtgggaggagtcttctgaagaagttcatgggatggttaagaaaggtctgaactcccttatcatcttgggggcctgaatgatttggaaccattgaaaccgatgtgtctttgatggactgacttctagtctttcctcgatccttgtgtagactgatgatgagagaagggcaactttggttaaagctgtgctcactgctattcccatttatcatctaattgctttgcaatgtccaaggtgggtaatcaaggcaatagacaagattcgcaggggttttctttggaaaggaagaactgacattagaggaggacattgtgtcgttgggtggtccaaggtctgtcgtcccctctctcttggtgggttgggaattcacaatttggaagtnnnnnnnnnnnnnnnnnnnnnnnnnnnnnnnnnnnnnnnnnnnnnnnnnnnnnnnnnnnnnnnnnnnnnnnnnnnnnnnnnnnnnnnnnnnnnnnnnnnnggcccccccgcgctgcaagtatttcatttggcttgcatctctcaaccgatgttggacggctgatcgactggcacgtcatggaatggatcatccagatagttgtcccttgtgtgatcagcaggatgagtcagtgcatcacttgctggtggattgtgtttttacgagggaagtttggtttacaacactaagcaggctaggtttgcaacatcttgctcccacgtctgatgctacaaggtttcaagattggtggagtgaggcagaaagacaagtgtctaagcataagaaaaaaggtttcaactctattgtaattttagtagcttggcagatttggaagcatagaaatgcgtgtgtgtttgacaatgcttccccaaacattcacgcaattttgctgtccatccatgatgaggctttattatggggtcttggaggggctgctgctcttaggcaggtttggttgtagtttgatttttggttttttaattttcgggggtgctttcttggcacctttgtactgggtcttttctagacccttttttcttatcttcttaatatatattgatgcgtggttctcccacgtgttcgagaaaaaaagatgatgagagaagaatatgggaattagctggggccaggggtctttccttcttggcaacacctcttcttgaggtctaacccccctggctctttagtgggtagtgtgagtgtttttacatggatcctttcatttatgcgtgctgttggcctctatagggaggttttttcttgtaacccaggtcttctttagaccttcctttccctaatatatttaaagcttagttcccctgcgcttcctagaaaaaaatatctcgcccaattctcatgcaccaaattcagttcccaacatcgtcttggctgattctaggatggtttgacacattatcgctggccttggtggactacattgccgctgcccatgcagtgtcgtgcttccacaagcttgaatttcattcatacgaatgattgacgtagtgtgagtagttcttccatggctaacacaccttggaggtcgacaagtcgtatcacctattcgaacatgacacgagcacactatcgtggatcgaattcaaggacctttgcaacttgtgtttttggcccccaattcgcaacaaccgcgttgacacattggctcgtcttcgattcttgaccaagatgcaagaataccaagatcatgtcatgccaacaagcgaagttgttcgctatgggatttccaaaatatatcaatcttgacatgaaattgtgggagccccaaaatcttcatataaaatcttcatataatcctatcatgatggcacacactgaacaaccatgaccctagtgtgcgttgtggcacactgaccaaccatgaccctaatgcacaatcagcactgatgctgaactccaacgaggaccactccaatgacaagcacatggacgagcaacaactctagcgttgcacctactctgtctattaacatcaatcgagttgtctaatcatcggaaacaagggttttgtcataattgtgatgagcaatacattcatggccatcactacaagtgactcttctacactgacgttgtcaactatcaggattatattaggtggctatgttgttgtcctcagtgtggccttcctgcgcatacttgcctcgtgttctagcggtaccagtgccacgtcttatgaaggggcattaggtctacatgcgcaagaagtctagctatggttaacgactccgtcaacaccacaaactctaggttcatggaccatctcctcaacatataagttgatctttttgctgaaacaagaggactttatcggcttggcgctgccaccactgcatgcacctgctactaaggacaactctagtagatgtcaatccatacatatacccacaactctagaagaataagctccatgctcgagaacaacatccaactgagtacattagcattgttgggccttgatgcttctcatcaagaaggttggcaactcatggaggttctgctttgactacagtgtgttgaattggaagacagtgaaggataaattttcgatcctgatggtcagtgagctactcgatgagccacccaaaattctttatctagctcgacctttggtcaggctaccaccaagtccacatctaccctgacaatgcgaaatgatgtttcttacacatcatggccacttcaagtttcttgtgataccgatgagcatcgccatcgcactagccacattcaacaacctcatgagcgacatgcttcgatagttgctttgctggctcgtccttgtattttttgatgtcatcctgttatagaacatttcttggatggagcatttgcaacatgtcaaggtggtgtttgatgtgctatgtgcgaacaagttgttcatcaagtggtccaaatgccacttcggtgtgttgttcgtctcctaccttgaccatgtgatctcggtgtatggcgtggctgtggatggcgaaaaggtggaagttgtggcatcgtggccacaactgtgatccactagggaactctgttgattccaagtatcgcgggtattacaagaagtttaacaaggactttggggtcatcgtagcacctctcatgaagctcttgaatgagggtttaggtggtgccaagaagcagaagatgccatgcaggggactcaatgggctgctatcaaccgcacctatactgcagttgttggcatttgacaagctgttcacggtagactgtgatgcgtcgagttgagtgcactaaggcgccagagcattgtcattctttagtgtaggtccttcgtagctcgacatctcaaggtggtagcctacgtgtgtgatacgattggcatggtgtaggcggtacaacgttggaggcatgggcttggtgcaggcggtacaacattggagtccctacttatggggttgaagccgatatggcattggagtccctagttacggggcaccattttctgcgcttaaagttcctgctcgatcaaatacttatcaaccccaacatcaatggatcaacatgctctttgactttgatttggttgaagtgtataagtggattgcctagcttctcccatcagcttaagcttttgggttgaactggttagtgtgtccactctaacatggtatcaaagccagaggtctcgagttcgaatcctgacagagacttaatttgtgcctccacccatttatttccacgtttgcgcgtttctctttgtctgcgtttgcgcctttctctctggctacacgtgagtggggggtggtgaagtgtataagtggattgattaccttctcccattagcctaagcttttgggttgaactggttagtgcgtccactctaacatggtaacagaaccagaggtctcgagtttgaatcctggcagaggctttatttgtgtctctacccatttatttctgcgtttgctccttttccatcagcttaagttttttgcgtccactctaacatatttcatagtgaagttttgggcaagcggaacacacttgctgacaccttgtccaatctcctattgtgacattgagactgtaggcactctcaagaccctcgttctagctctataacgacatttgccacgaggtccagacacagtgagttgggcgatccttggcggatacacgatgtcctcatcctccacgacaactagatcttcctagacacatcctctagcttgttgttcacttctttggagatcgcacaagacaagtgtccataaaaacgctcaagtgcctccaagtggacttttatattgctcgaggccgcaaggtggtctgttattttgtgaaagccttttcacatgctagaggaacaaaatagaaactcttcacctgtcgggactgctctagccattgctggtgatgttgaaggtttggaagggtgactcccttgacttcatggaaggccttccaagggtgcacgagaagtgtgatcctcacagtcaccgaccatttttctaagtatgcacatttcattgccctcgttcaccacctatagattgtggcatcggttgtgaaggcgtcattcgatggtttttatggcttttctagcatccattgtaagcgaccaggaccccgtgaaaggtaacttttggctggacctcttcaagatggctggtgtgagcttcgtataagcatagctttccatctacaaactttttttttcctcgaacagcgcaggagaactgcgcgtcatttcatttaaggaagaaagtaagtacaaaggtcaagagtgacccgaaacacaaacaccaacacacacacgccatccctcaaatacaaccgtcgcgccacatcaatgaagaaggcgaccacaacctacagggctaaaaaagcaccagtaggcaccgacccaaaaacaagttcctggagtttggaagctccagccaaacaccacagccccccttccacattaacagcttttagcacttcctcaacacatggcctagaattgtcaaagacacacctgctgcggtgcttccaaatctcccaagccactaacataattagtgaattgaggcctctacgaagccccttaggaacagcagcaacagttctcttccaccaacctgggaaccgagacactagaggtggtgaatagaactattgcaatgtacttgcagtgcatcacgggagataggtcgtgcacatggctggaatgactgccatgggaagagtattgatacaatacatccttccaaatcacgctcgaagataggcgccactgcccttggtcccattcacagtgcgcaccacgcgaactcaagcagtgcagatggcgctttaggagcgtgaccggtttttggcagagctctatgaatgactggttcaagcccaatatcacgggaaacgctaatacaataagcaccatcgcaaactagagttcgagatcggctcttgggtgtggccatgaacaggttgctgaaaagtgtctctgataccaaagatgatttgtctggattgttggctttattgatacaatgacaaggaaatcatcctgaccgccctccctaggaggctctggtcataataactcacttcttgctaaacccgtaatcaacattaggtttacagataaataggcttagaggttagctgttagagaaaggtatatgctgttgcaaaagatgatgtcttgcattgagctcttagatgatttatacagagtacatggcgtaggaggtaagacaacccatggatacatatggcagtctatgaagtataatatctagactatcaaatatactctaacacatgtggcagtctactagacaatatctagactaccaaatatactctaacactaaccactcccctagaatttctcttttttcctattgttcctcctagacttccaactaagctccatgcagacaactacggaaaaactcaacaaacttgacaactaattaggcgtggctgttagccacatggtgttgtggacgctggcttgttcttcttgtggcgagtatagacttgctgataagcgtccacaacaggttgttcgtgactgctggtgtgttaactctactatgaaaatatctatgtgcagtatgaagaagctaagctatttggttcagaactgaacctgtattcagtcttagcaactctactcatcaccctcctctagttgcaacccaatagagtatttctgatatgtctttcatatcatatgcattttgtacaagcagattagattatgtccaagttgtgtattgtaatgattttaatgtaagtttgtcttgtaatatagtctttaggaattgttccttgtggtattatttattatctgtttcttcttgtcttttgtttgtttatcttttattccaagttggggtgttcccatcttgtttccttgaaaagattgtactgttctcatgtaatgcttctttcaggagattcctattgctgatgtttgtgagacatttaaggtcgccagaggtatgattcaggcactgcaggaaaatgctggcaggtttgcttcaatggtttctgcattttgtcaaaggcttggttggaatgatttagaaggccttgtttcgaaattccaaaatcgtgtctcttttggagttagggcagagattgcagaactgacatcaattccatttgtcaaggtgtgctttaattaccatgcatatatgaattatctaagtgtctctggatcttatttcagtatggtcatgtaaaatatgaaatagggttcacgtgcaagggctttgtacaagtctggtctgcgtactcctgttgccattgctgaagcatctattcctgaaattgcaaaagctctttttgaatcttctgcttggtctgggcaaggtactctttcacgtattcatggtctgattccttactactcttttttatagtacttgttttgatgaggatataaatactatagctgaaatcctgtcctgtacagtcaaggattttccttgtacttatcttgggctacctctcacaattggcaaacccacaaaggaggtcttgctgccataattgaaaaggtggcagaatttttgctgggatggaaggcttctttaatgaactgtgcaggcagattggtaatggttcgagtagtgttaactgctgctcctatttaccttttgattgccatggatctaccaaagtgggttctaaaagccatcgacaaaaggaggggtctcctctggaagggccaggaacaagctaagggaggtcactgtttggtctcttgggaaagggtgcaacagcctctggaatatggtggtcttggaattcataatctggatctgcttggctgcgcgttgcagattcgctggttgtgggctgagaaaactgatcctagtaggctttgggcaggcctccccgctcaagtccctcgcaatgcttaggccctcttcaacattgcagtggacatcattgttgggaacggtgagcaaacactcttctggacagacagatggctggatggccataccatatctgaagtggcacccagcttatttagtgctgtctcgaagcggacagccaagaggaggacggtagcccaagctctccaaaaccaaaggtgggtggatgacatcaaaggagcactcacagtccaggttatattcgagtatctaaagattgtcgcatggtggatggtctgtttttgcagcaagatgtgccggaccaattttgtgtggaaattaacacaatccgacatttacacagcatatagtgcttatttcattggcaccatcaaatttgggccatggagaagaatatggaacagttgggcacctcctcgctgtaagtttttcatttggctggtgttccataaccggtgttggacggttgatcgccttgctaagagaggcttgccccaccctgatgcgtgccagctctgtgatcaagatgatgaagacattcaccatctcttggcctgctgtgtttttgctagacaagtatgagcaagcatctttcttcagtcgggccatactgccttggcgccatatgcttcaacaatctgtttttcaaaatggtggtggacagtaatctcaactgttcctaagaaaatgcggaagggtctaaattctttgatcattttggtcgcttgggaactgtggaatcattgtaatgcttgcttgtttgagcaacataggcccaatgttcaggaagttcttagggctgttagggatgaaggtagtctctagtgcagcgctggagcaaaaaagctccaagagctaatggtcacggtgttcagtctgggggattaggagcttgttgaggttcctttccctggccgcctttcttttttctcttctgtttgggttttagcgtctccagggtgggaggcgtgatgtacagtgggtgtgggtgaggtgttcttgtatttatttttggcattcctgcctttcttctaccttaatgaaatgttgcgcagctctcttgcgttgttcgagaaaagaaaagatgcacaaattggtttctcagttacttctggatatattcagtaataagcttgcagatactttattgtttgttttaagcctactctaatgtcaatctgttgaattgactaggtgattctggtttacgacgaatgcaatttggtgtagcaaaaaaaataaaaaatggagcccgcaaaattgtcctggaggaggcagaagccgccagagtagcagcattctcagctttcaagtcacttggtgtggaagttccccagttcactgcacctccactcgcagctattgaggaatatccaactcacgataccatagaccaagctaagttaaataagctagcttctggtacccattctagagatgataaaaatatgaatacttgctctgattatgctactccaagggcttctacatacagtctaagaaaggacacaagtcctgctccttccattcaaatgaaagagaatgcaggactatctaaaaatgtgcaaatcactagacagggagcatcatcatctttgtcaacagaaattgctgatggatctagtagagatgtggctgaaaaaggtcctgtccatgcatataacttcccagggggatttgattgttttcttgatcaatggtccacagctagtaattttttctttgatgttcattttatcaagagatcgatgaaaccatctttgaacctttttgaagtttttgggttggctgtctgttgggaaaaatctcccatatactactgcaacttcccaaaagatctagtcactactggcaacaataacatcaaggaaatgtggggtaattttcagagaagatgggaaaaaatagcggacattatgaaacaaaagagtgtccaaaaaatgacatggaatttaaagatccagatccaggcacttaaatcaccttatatttcttgccaacggcttgaaaggtttcatcttgaccataaaatgctggacaaagttgaagtgcttaacaactcatatatgttgttatcaccagtctctgtctacaatggattggatatatgtctgctggcgtgggttctatggccagatgaggaaagcagagcggttccaaatcttgagaaggtatttgatatatgtcgtgttctgcaatatctttagcttttcgttgctgatgcattgtcacttcatgtacattttttatattcgtttttttctgaactttgcaaaagcaatatgagtaggaattttagttgataagagcctcaagaaccgtgtgttggatatgaaaatgcaaggaaataggattattcatatagggcatgatgagaatgctaagagactttttaggaagacttagatgtcatgtttacaactatacctatcagtaagaaacttttcataggagatctcaatgggcatgtaagtacaacaagtgtaggttttgaggtgtttcatagaggcttccccaagcttcacgtctcagacaatgtttcttgaccaagtgggtttggctatgacatgaagctaagaaacattgtctggtcatgtccactttggagcgtaccgctcgtttacgctctcgaatctgcttccttaaagatggtgataccaattccatagctatgttttctggtcgcccgaccagctagtcgaactgggggatcgaccagcgactaatctcgattagtcgtcgactaggtccgactaatcgagctctggtcgacctggtcgtcctgttcatccaggagaccaggacctatgtatatactatataatatatactattatactatatagtaaataattatataactatatagtatatatgaacttcatatactatattatgaaggatagggtaaacatgacatgaattcagcaatactgaaaagtgaaaacagcatagaaacacttctagttattaatactacaagtcccagataccagtaccacacaacacacattaatactacaagtccaaaaaaaaatctaggtcctaaacctagtcgcccagaaccggctaatcgagcgactaatcggccctaatcgtcgactagtcggacgaccagggcgaccaggtactctagtcgagtcgactgcctaatcgagctctgctaaccgactagcccgactaatcgcgactaatcgcgattagtcggacgacttgaaaacacagttccataggcatgccagtttccggaaacaaaagaactttattgggaagttggtggttgatgatcagattttcacctcgcaagatgagaaacagaagcttgatggtatcttaattgcggatgcaagaggagacttatctttcagttatatcttttggtcgaacaatgtgcttgacaagtggagtatagtggtactaatctacacgagtaagggaaatatttaaagttgtatcaattaccaagtaattaagttgatgaaccatactatgaagctatgtgagagagttatcgagcattgtttgagaggaataatgaggatctctatgaaccaatttggtttcatgtccgaaaggtcaaccatggaagttattttcttaataagacaagggatgaagcagacagggagcagaaggacctacacatggttttgttgacttggagaagacttatgacaatatactaagaaatgtcatgtgttggtttttggacaaacataaaatctcaaggaagtatgttgtagtcattaaagacatgtgttcgaacaagggatggagacacaaataacttttcgattagaatatgactacatcaagggctggctttgagcccttatctttttgccttggcgatggatgaggtcacaagagacatacaaggggataccccttggtgtatggtttttgcgcacaatgtaatgctagttgatgaaagccgagcaagagtaaatagaaaactagagttgtgatggaagactctagagtctaaaggtttagactcaatagaacttaaactagagtatatgagatatgacttcgacactactgcacatgactacatacggaaagagatcttagtttggaagtttaagtagtgcttaggaaggatatcttttagtatttagaatcaatgctatagaatgacagggtattgatgaaaatgttagccatagaatcaaagtagggtggatgaagtagtgtcaaccatatgatgttctatgtgacaagagtgtaccacagatgctaaaagacaagttttaccaaacgatgattatacctgctatgtagtatggtgtagaatgttggcctataaaaacacattttcaatagacaagaagggattgagttcgaatcatggaatggtgatacacatgataagctaggggtagcaccaattgaagaaaatcttgtctaacacctgttgagatggtttgtaccatggtttttaaagcggtaaggcgctccaaggcgttggaccaccgcctagacgcctaggcggcgcctaggcgacgcctaggcgaggtaggcgggcaaggcgcctaggcgtcagaccaccgcccggacgcctaggcgtcgcctaggcgacgcctaggcgacgccttaaaaacagtggtttgtacatgtccaacagagaactccattagcaccattgtgtagtgacgcgctaataatgggaagagagatggagaaaggctaaagttaatatggaaagaggcattaaaaggagtcaaagatttagtcttgaataagagtgcatggaaaatagctatccatgtgcctgaaacttgacttatggtttatgttgggtttcaacgctagcctatcctaacttgtttgggattaaaaggatttgttgtttcttgaatacgcaggaggtctgcgtatttttatattaagaagaaaaaaggggggggggaccccaaaacagaaacaacagttttacaaactcacaccaccattaacgcctaagacaactcctctaaaaggatttgttgttgtttgcaatagcaatacacagctgttaattttgatgctgacctatttctgataatatattacttttgcattttactttgtgataaacagtttgtcaagaggcgacttcatagtcaagaagccgctgctgcaaatcgcgatggaagatggagaaatcagatgcacaaagcagcacacaatggctgctgtagacgtgctgcacagacacgggctttgtatactgttctgaagaaattacttactcaaaatctttctgttttggttgaaacaatcgaggccccattggtacaacacctattcttacttaatactctctccagttataacaaaagtgtcattttgggttgcctgcagttaatttgtttatactttgatgctttggattgaatatctgaaaataacgcaactagattcttcctggaaagtagttcaaaatataacaactttgttatagtttcatacattttgtagcaatcgaatcatcctattagtacccatgttggtatccaaaattacacttgtgatcggaatacaatattgctgcttgtattatgcttggatatctcttatgcatttattttgacaggttaatgttcttgctgatatggagctttggggaattggcgctgacatggatgcttgtctccgtgcgaggcatattataacaaaaaagctgaaggaactagagaaagaagcttacagattggcaggcaagaatttctctctaaatgctactgctgatatcgcagacattctatatacacacctaaaattgccagttccaaaaggctgtgagaaagggaagctgcatcctagcactgacaagcagtctttggaccacctaaggtattttttcattttccttgttagttctgacatcaaacatgttatttctagttctttggaagtacttgtgtgccactttatgtccgtgcattatggatggaaaattttaaatgtgttagcatatctagtgtctagtcactgatggtctattggtagttttgtgtgagtaaaggtaaattattatgttgtcttgatcagagctagaaaagtgcttgtggaccaccggccacatgttattggcagttaatctctggacatgcttttagaatatcattgtgctaatatgcactctttttctgttttttttggagtcaattaacaggattaactcatttttcatccctaattaaatacacgcatgcatgttcaaataatatcttcaatttggaaaagcttatgccaaagagaagcacatgtatcactgctttactgtattttcagtatataggctgctgctgatgtccttattgtatgcactcggaagatcggtagcaaggcaacactacaacagccttgccaagctggtcttcctttcgtttgaaatctatggcactcttttgatttcacttggccccaaattttcctcgacataaaattgccgtggctttatagtttactataaaatccttatcaactggacataatgctctctttaggcttctattaattatcccagtaatgtaggagaatttaatttgaccattttgctaaaatatttttgaattcttctgtttcctcagggatcaacaccccattatcccattaattaaggaacacagaacattagcaaaactgttaaatggcacgttgtggtccatttgttcacgtgctcaattgtgcactcaatcacaaaggtacatcatacatggaaattggcttcagacgtcaactgccactggccgtttgtccatggaggagccaaatctgcaggtcctttagttgtaataaatgctttgcatgttttgtttggatttcagttattgagaaataacctactgacttaacctgttactatgtagtgtgttgagcatgtggtggaattcgatacagggaaaagcgataaagattactcaagcatgtcagttgatgatcatcataaaatcaatgcccgtgattttttcatacctaccaaggtttttctcatttcacttttatgtatttattaagttttccctttaattaggacagttgactattttcctgtaacaacgctttatttaatatcatgatttacttattttgtaggagaactggttattcataactgctgattactcacagattgagttgcgtttaatggctcacttttctaaagatcatatgttggttgaacttctaaagaaacctgatggtgacgtttttaccatgattgcttcaagatgggctgagaaagaagaggccttgatttcttccaaagagagagaaaacactaaaagattcatatatggcatcctttatggaatgggtgcaaactcccttgcagaacaacttcagtgcagcactgaggaagctgcacagaaaattcaaagctttaggagattttttcctggtgtttcctcatggttacatgaagttgtgttatcctgtcgccaaaaagggttagtctacttggtagcaatttctgtttagtctttctttttatataatattgctcctttgatttttgatgctaacattgaatgagctctgtgaaaaatatgttagtcttaacttttgtggtatttcatatctgaacttttgagatatttcatatttgagcatgtattatcatatctttcaatgttagtatgcgagctgcttctcataataatttaaggtgaatatgcttcatgataatttgattttatttgaatgttaagtttatacagtaaatgataaggattactgtcttttggtcatgttatttatataacgactacttaagatcagagctcctttatctgttgggttgacatatgcacttgtagcccatattgctcatgagattgtatatatattgtcgtatccactactagcggtcttacgaaaccccaaggttactaaagccatggattagagtttgggataactttcaaatgcactcatgattcaattttctttttacctggtttgtgccgatcagaattaatgtctgcgcccttcttcagtttgttgtggcctaacttgtgaaacccttgctatctcacaacttccatctgttagacaatttattttcttccctagttacgaggatttcttctctgattatgtgccagcagttgtttcctccgtacgtagctgtccttgattaggtgtggacaattggttccttcctccctggctgtttccttttagcgcccagatcatctccccgattattgtttccatgaaatcaggtggagcacgttctggtagaggcctattgttctcctgctatttagttgaatataagcaacatttcgcgctattatggcatcaagagattgttacgatcccgtgagaactcgcttttggtaatacttgcttgcccacgtcgcctccccgatgttgtgccgtcatgccacctagtgaccctctgcccgttttccggtgaccaacaacataccgaggatgcagccacataggagaaggcctgctagatccttatcgttgctgccgatgaggctgtcaaggccgtcactgccgcctaggatcatggccgcacaacccaggacgctctcgcgagggaacgctaggctgctaccggtctcaagcgtgctaaggccgctgctcgtgacgctgccttccctcctctcaacgacgaccctgatgatgacgccgacgctagtgaagacttcaattatgaggccgctaccgcctccaacctccacgtggaggccgtgggcgtacagaacctccatgcccttgtgcctgtggttctggacatcctctccacccactacagtcgctgcgggatctcgtcctcctcgccctcgagcggtatgccgtcgccgaccatgtcctcttcgacgccctatttgtgccatcctatcgacgcatggacatcgtcgtcttgtcatgggtgttgtgcacgctctccctgagtttgagttcgctcgcacccccggcggcacaacacaccacacctggatcgttgttgaggagcaattcctcggtaatcgtgaagctcgcgcccttcatcttgacgccaaattctatgtctttatgcatggtgacctctctgtcggtgactactgccacaagataaatgggatggctgacgctctcggtgatctcggagtggttgttcgtggccgcatcctcattctcaacgtgctacacagcttgaacgagaaattaaaccacatgaaggtccactttcatgcactccaagctgctaccttccttcgtctgcaacgacctcatcctcgaggagattgactacaacgcatcaacaccgccaccagcagccgcccttgttgctgtgcatggcctttcggtagctctgcttcccctagcgtcccctcttctgggggcttagctgcgcccctgtcccacccacggcgccctccggtagcatctccactggtgccgacagctattagtagctaccgtcgtcgttgcgacaacggtggcgttgaaggcaaggccatggttccctagcctttgatctacaactcgtggaccgagttagtcaccatgtggcctggccccacatgtgggccacaagaccgtggtggccaaacgccgcgcgcgcccatgcctcaggccacgcaacaacagttgacaacaacatgactagttcgtggtcatgtcgtttggcttgaggaatgcgttaacatcattctagtcccccttgagaattgaatagcactcctagctgacaccatggactcatcgcactcttcatgggttgcttggcctcacgggcttctaccgcttcttcatcaacaactacgacatcatcaccacaccatgaacatccctcaagcgtgttgccttccagtgtgctgatgtggcgactacatcctttgaggccttcaaggcggccctcacctatggactggtgctgcagttgttgagcatcacggcttcgtccatcatcgattgcgattcttcgggcattggttttggcgtgctcttgcccgatcgccttgtttagtctgtggatggagccccagcctaccaaacttgccacctaagagcgcgagctcattggccttgtgaaggctgtgcggcactagaggtcgtatgtctgggaccggccagtggagatagaagattgggtccctaatgatttctcccctactagaatactgcaacagaacctttgaatcttttagtcctgaacaagttgtgcaggctagtttcgaaatgcaacaagggaccacaatatcgatgatacagctaggcatacatcaaagaagtttctaattcgttatcactcctcagatttgttgagactttattaggccggcgacgtgttcttacaaaaataacggctggcaatagcaaagagaaagctaaagcacagaggcaagcagtaaattctatttgccaggtaatatagcattctcacatagttttagatggttgattttattgattatatgattaatatgcatgtgtttccagggttctgctgctgatattattaaggtggctatggttagagttcattcaataattactaacagaactagtgcaactgattccacagatgaagttacaaggaaattttcagaacttggtggccagtgtcaccttattttgcaggtgttttaagacttgcattgcatgatacttattttcttttgacttttgctcagtttggctctaaatatggatgaatgcaactatatatttttcatttgtaggtgcatgatgagttggtattagaagttgatccgtgcatggtagcacaggctggaaggttgttacagatatgtatggaagaagcagcttcactattgggtatcagttttaatctaaacttcgatagttatcttatgttcagtctttgggagcatcttgaaaaggtctttaaaatttacctgctaaactaatagttatgccaagtgaacaaaatgaataggaagttctatttctgccgttctccaatagttaggttcttaaaactaacaacctgggcaggagggtatggggggagcacgcaaaaactgcggaggaggaggcacaaatagtagatatgacnnnnnnnnnnnnnnnnnnnnnnnnnnnnnnnnnnnnnnnnnnnnnnnnnnnnnnnnnnnnnnnnnnnnnnnnnnnnnnnnnnnnnnnnnnnnnnnnnnnnnnnnnnnnnnnnnnnnnnnnnnnnnnnnnnnnnnnnnnnnnnnnnnnnnnnnnnnnnnnnnnnnnnnnnnnnnnnnnnnnnnnnnnnnnnnnnnnnnnnnnnnnnnnnnnnnnnnnnnnnnnnnnnnnnnnnnnnnnnnnnnnnnnnnnnnnnnnnnnnnnnnnnnnnnnnnnnnnnnnnnnnnnnnnnnnnnnnnnnnnnnnnnnnnnnnnnnnnnnnnnnnnnnnnnnnnnnnnnnnnnnnnnnnnnnnnnnnnnnnnnnnnnnnnnnnnnnnnnnnnnnnnnnnnnnnnnnnnnnnnnnnnnnnnnnnnnnnnnnnnnnnnnnnnnnnnnnnnnnnnnnnnnnncccccccccccccccaaaaaaaaaccaaaaaaagggagctgttctaagaagcccatggagatgctctaaccaaggtaaaactgaattggtgtttgcttttatttcagtacctttgcgcacaaagataaaggtgggaaaaacttggggttcactagaaccattctatcctgagccttgttgatgcaaatggttaatgtcagttggatgccaatgtttcacgacatgcaaggtcctggaagaaggctgaacaatttccaatatgccccacagggaccttggtaaatcctactcttttttatagaagattcaccccctgcagagttaatctcatgaggcctgctatttgccactatcgtttcttgttctgcattgtccatgtatttaactgatgcataccttgaaccatatatgaccatatatccgtgtgtggctttgctaatcttgtattttgaatttagtttacattttcatcttcacggtctctttgaaacttcaaatgaatcaggtgattctgtctggtgttcttcggtagaaccttcattgctatgtctacagtcttctgtcattgctgaccgtatgtgaaatcaacgcaacagcgaccagctccattactgaggatttgctatggactggtgattatcattatgattccatgtggcatgcaagaagcatatatatatatatcaccaatagatgctgttaaagggtttaaggtgtatttgaaaggtcttcctagttatactgcgaatcttttagataaacccttaagaaattggagggcctagtatatggtgatttttcttttgctaggtccagcgctaaaaaaccgattatggggtttattcaaagatgaaatttcatcctgtaactacaggttcaaggtgtatttggtttgatggatatcactatggacaagcgatggttggtttttgtacaagttggatgttgataaaaatgttggtatccatgccacacaaaaaaagcctaaccagcacccatattttgtaatccttgtcaagtatgttatatggtttacttgatagctctagcgaggctatccagtacctcaccttcaccctcatatttgtaatccttgtccacataattattagtatgttatatggttatttagtaattacgatggaaatatta

SEQ ID NO: 33 - DNA, 154 bp, Artificial Sequence
  marker ma61227s07
ataactgttattttgcaagttacgggtctaattttgttgttccagtgctatcctgcctttgaggggtgactgtgattacagcgagcagtgccagatgaagyagaagcggagtgcgtcccagtcattcttggttccttgtgacaacgactatgtc

SEQ ID NO: 34 - DNA, 72885 bp, Artificial Sequence
  genomic DNA of mutant pol theta (c->t at position 657)
  misc_feature (5583)..(5733): n is a, c, g, or t
  misc_feature (31155)..(31650): n is a, c, g, or t
  misc_feature (44470)..(44479): n is a, c, g, or t
  misc_feature (45143)..(45152): n is a, c, g, or t
  misc_feature (46993)..(47109): n is a, c, g, or t
  misc_feature (53299)..(53398): n is a, c, g, or t
  misc_feature (71287)..(71733): n is a, c, g, or t
gcccagcaattcaaaagaaaccgaacacccttccggaaattccctctggcaatggcgtcgggctcgtctcgcccccaaatcgaccaggtaaaaccctaacctagttcctcgcctattcacttcgtcgcctccaagcgctaattcttcctgcgttccggctccatctcagttcttcccggccaagaagcggaggccctcgtcgcggaagggcgagtcgccgcgacccgggacgcagcatgagagccccggcggcgccaaggggtccctggaagggtacctcgtccgttcgccttgcaaccgtgccgtggcagcggcatcggtggtccccgtgggctcgcccaggggcggggacccgggcgccaggcgtagcctctcggccgcaatggatgtcgacgtcggttcctcggcttcggtggctgcggcggcaggtgacggggcagactttgatctcaggaggagcacggcggatttcttgtcccattcctgcaggtgagcgcgcacagtgtgaaacataaggggagttatagtattggttccaataactgttattttgcaagttacgggtctaattttgttgttccagtgctatcctgcctttgaggggtgactgtgattacagcgagcagtgccagatgaagcagaagcggagtgcgtcctagtcattcttggttccttgtgacaacgactatgtcaagaagcagcgagttgcccattgtggtggctttgaagctctaaaggttggatcaagatacactatccatccatctttagcatcgtcatatgataagtgatttcatgagtttcaactcttagtttggttctttgcaggagttagatgataatgtagcttccatgaagcaatgcatcaatcaccatggtggctcagaggctgtggaggtttagttatgcctgaacaagtcaaacctggaaccgtttctttgttttcctcttttccttttgaacttctcattatttccttttcatcaggaatctgttgagggggaacatgtgagttgtgttgggttttcggccttgcaaagatgtagctttaccccaagtactgcacagataaaagttgggttttctctagcacctgtggaaaccctaaagtctgtatcgaggaattcccttacttcacctggtgaggagttctggaatgcagcaattgaactcgctgatgggatatctgcccaggctgataaggtccgtggaaggccagaatttgatgcagcagaagacaagtcatcttgtgcagtagcagcattctttaagactcttcctagatcaggaagggatgagcttgactgtcaaaacacagtaggcagcaatgatacacatcatatagagaaattgtcaaataaagttgaatcactggcagtaaactgtcagcatataattagctcacctttgcctgtgaagcagctagatttctttcatgaggatgatattaaagtttcaggttcaaaatttgaaacaaaaggcagctatgaaacttgtaatgcacaagcagaccgtgttccactgaaaggcagtggccgcctagaaaaggaaaatctcatggaccctgtggatgtgatgaagagaagtgctattaatttgcacactgattctgcagccatgagatgtcagggtgttttcaagtcaacaactgaagggaaggttcatccaactcaagaggctggaagagattctaatcttattaggagagatctcaatcagccaacccacaatgaaaataaatcacttgctgcatattcaaataatcgcaagacttggatagattccaagagtaaagttgcttctcaggaagtggaagctagcacacctactagctccattcctctaaaggatcactcaaagatatcaagttggcttcctcctgacctttgtgctatatacatgaaaaaaggcatttcagagctgtacccttggcaggttaaggttcttttctctaattatctatttaatgaatctctggcagctagccttctttcgtctggccatttttgcctatgtatttttttctccagccatgcaaactaccactgccctctctactagtaggattaccaattatttttgctcgtaagctaagcttctttagtatttgtatcgtaataagtatgtcttgaaaactagtacttagtatatcaagtgctgagatggtttgtacatgtccaatagagaccttttagaggcaccagtgcatattagtattataaaacattaaaacgtgatagtaatgggaagaggtagggaaaggccaaacttgatatggaaagatgcaataaaaggagacttaaaatgatgaaatatatctaaagatttagtcttcaatatgattatgagtgcatggaaaacaactattcacgtgcctaaccttgatttgtggcttgtgttgggtttcaactctagtctacactcacttgcttggtactaaaaggctttgttgttattgttgattcatataaaatgctaagtcttctcttgtattgctgtcatcacattcttttcacgtttttaatgcgtttttgcttcatttttctcgaatattgtaatgctctcctagatctgtctgaaggcatgtttggtttgtgcccccactatgctaaaccaaatttggcaatagaagaaaccatgacatggccttttgtaacaccccgtccaatccctggaccggcggtacttactcctggtagctctctagaatcatatattgtccccacagaccaacacaagtcttttatgcgcactttgtcctcactcatgcgcacccgagaaaacttcccagtcggtcacccatcccaaattgctccaagccaagcacgcttaacttggaggttcttttgagataggcttcctaaaaagaagatgcaccttgttgatatggttactctattaattctattaagccttgggccaggatatcccatcccaggggccaggatatcacaattcaccccccttagaagaccgatgtcctcgtcggtcaaccccaatccaggaacctcccctcttagccacgtctgtgtgtctagtgtcgtcatatgccatgccatgtgaccactctgggcccacatgcgccatgcgccatatacccaaaccacctagcccacacacgcccgtgaaacatcgagggtcggctctgataccacttgtaacaccccgtccaatccttagaccggcggtacttactcctggtagctctctagaatcatatattgtccccacagaccaacacaagtcttttatgcgcactttgtcctcactcatgcgcacccgagaaaacttcccagtcggtcacccatcccaaattgctccaagccaaacacgcttaacttggaggttctttcgagatagacttcctaaaaagaagatacaccttgttgatatggttactctattaattctattaagccttgggccaggatatcccatcccaggggccaggatatcacacctttaggcaggtacaagatttgaattggattattggagccaaataaatttacataaatatctacctaactaaaaggaacaatgtttcttgttgccccttccacccaatgataggtggacccaaggtaatcctgcgtctcttatgtcaggtcagcactctctcgctaagagccatttgttcatgattgaatagccaagtgagatggccaccatcctcgaggtcatgttttcggacctaggatgtcaggccgaatgtgttctggttcttggagttgtattttgtttcttttaatataagccgttcggttgcataggccaaaagagcagtttgaggccaaatgaaattttagcggcgagagctgtctcactgagttgtgagtttgaagcagtctttccgcatttgcgcggggggggggtgatggaataagtcttgagcatctagaggacagcctgcttttgactgtcctctgtagtcctttagcatctagaggacaacagtcgctttttgactgtcctctgtagtctctttagcatctagaggacaacaatcgcttttgactgtcctctgtagtcgctttagcatctagaggacagcagtcgctttttgactgtcctctgtagtctctttagcatctagaggacaatcctgttgtgtagtgtgtgtgagaaggtgtggtagtgcagcccctagggctataaatatgtgtccccaacctctctaagggtatgacattgtgtagtgtttgaggaaataaacagaaaattgccccaactcatagtgtcatcctcttgatgagagttagagtccctctacttacaattggtatcagagccaaactatcctgcagcctaaacatatcgtgctcatctccttctcgcgtctctccccacactcagtcggcagcaagagctccaactgttccttcctcccctgctcagacgagcagcctttcgtctgagacagcctcttccacacgcagcaacccctcactagcccaccatgtccctacgctcggccacttcgagtgcgcggcgccagcaggaggccgaggtcgccgcggcacaagaacgcgagcgagcagcagcagcggctgcagcgacagcggcgagggcagcacggttggcggcggcggaactggcagcggcgagagcggaagtagaagcagcggaggcggcggatgctgcacgtgcggcggcaacagagctcgaggttctgcgcggcagtagagctggcagctctgcttctgtcgacgacaacaccgacgaagagctcaggctggcgagggaagcagcgcgagagcaggcggcatagtgggcagccgcgcatccccatgggggcgcgcgtggcggcagcccggatacgcgctgacggcgctctaggcggaggcgcacgcggcggcagcccagacgggcgtagacgcgccggcggtgctcccggcggcggcgaccgagtcgacggagatcgcggcctctacaggcggcgcggttctccctccccggatcggtaccatggtcgccgcatggcccaggccattgtcagggacatcggtcccggcggtggggggcctaccctcaccaagaccaactacgtcgagtgggccgcggtgatgagggtacggctccaggttcgccacatgtgggaagcagttcgttacgacgacgtcgactaccacgaggatcggcgggcgctggatgctctcattgctgtagtcccgcccgagatgcagttttcgctttcccagaagcggactgccaaggaggcctgggacgccatcgctgcgacccgcatcggcagcgatcgtgcccgcaagaccacactgcaggcacttcgcaaggagtgggagaacctggccttcaagccaggtgaggatgttgatgactttgctctccgcctcaacactctgttgcagaagatggtgcagttcggcgacgacacctacgatgaggagagagctgttgagaagctcttccgttgcatccccgagaagtacaggcagattgctcgctcgatcgagtctctgctagacctctccacgatgacgatcgaagaggcgattggtcgcctcaaggtggtggatggcgacgaaccacaggctctctctgggcctatcactatcggcgggnnnnnnnnnnnnnnnnnnnnnnnnnnnnnnnnnnnnnnnnnnnnnnnnnnnnnnnnnnnnnnnnnnnnnnnnnnnnnnnnnnnnnnnnnnnnnnnnnnnnnnnnnnnnnnnnnnnnnnnnnnnnnnnnnnnnnnnnnnnnnnnnnnnnnnncagggtgacaagaagaagggggagtcctcctcctcgacacgaggccgcaaacgcggcaagccgcgcaagccgcgtggaggcgcccaggccggggcgcgaggacatgctgagggtggtgcacgtggaggtgcccaaggcggcgccgtcggcaacaagaagccggcacgcgacgacggctgccacaactgcggcaagcttggccactgggccagggattgtcggcagccacgacgtggccaggccaacgtcgcacaagcagaggcggaggaggaggccctgctcctggcacatgcaagcatcgagccatctccagcggcaccggccgcagcggcactcctccaccttgatgagtcgaaagcacgcgctttcctcggcgacggctccaacaaggacatgatcgaaggatggtgcctcgacaccggcgccactcatcacatgaccggccgacgggagttcttcaccgagcttgactctagcgtccgaggctccgtcaagtttggggacgcctccggtgtagagatcaagggcgccggctcagtcgtcttcaccgccacgtctggtgagcacaggctgctcaccggagtctactacatccccgcgttgagaaactctatcatcagtttgggacagctggatgagaacggttcgcgcgtggaggtcgagcacggagtcatgaggatctgggatccctctcgtcgccttcttgccaaggtacgcaggagtgcaaatcggctttacatcctcaatgtgaaggtggcacaaccttgctgccttgctgctcgtcgagacgacggggcatggcagtggcacgagcgcttcgggcaccttaacttcgaagccttgaagcggctcagcgccaaggagatggtacgaggcctgccgtgccttgaccatgtggagcaattctgcgatgtctgcgtgttgacaaagtagagactgctccccttcccccagcagtcgagcttccgagccaaggagaggctcgagctcgtgcatggggacttgtgtggcccggtgacaccagccacaccaggaggacgacgctacttcttgctgctcgtcgacgatctctcccgctacatgtgggtgatgatccttggcagaaagggagaggctgcgaacgccatcaggcgtgtgcaggtcgctgcggaggcggagtgcggccgcaagctgtgatggaataagtcttgagcatctagaggacagcctgcttttgactgtcctctgtagtcctttagcatctagaggacagcttgactgtcctctgtagtctctttagcatctagaggacagcagtcgctttttgactgtcctctgtagtcgctttagcatctagaggacagcagtcgcttttgactgtcctctgtagtctctttagcatctagaggacaatcctgttgtatagtgtgtgtgagaaggtgtggtagtgcagcccctagggctataaatatgtgtccccaacccctctaagggtatggcattgtgtagtgtttgaggaaataaacagaaaattgccccaactcatagtgtcatcctcttgatgagagttagagtccctctacttacaattggtatcagagccaaactatcctgcagcctaaacatctcgtgttcatctccttcccgcgcctctccccacactcagtcggcagcaagagctccaactgttcctccctcccctgctcagacgagcagcctttcgtctgagacagcctcttccacacgcagcgacccctcactagcccgccatgtccctacgctcggccacttcgagtgcgcggcgccagcaggaggccgaggtcgccgcggcacaagaacgcgagcgagcagcagcagcggctgcagcgacagcgacgagggcagcacggttggcggcggcggaactggcagcggcgagagcggaagtagaagcagcggaggcggcggatgctgcacgtgcggcggcaacagagctcgaggttctgcgcggcagtagagctggcagctctgcttctgtcgacgacaacaccgacgacgagctcaggctggcgagggaagcagcgcgagagcaggcggcacagtgggcagccgcgcatccccatgggggcgcgcgtggcggcagcccggataggcgccgacacgctgacggcgctccaggcgggggcgcacgcggcggcagcccagacgggcgtagacgcgccgacggtgctcccggcggcggcgaccgagtcgacggagatcgcggcctctacaggcggcgcggttctccctccccggatcggtaccatggtcgtcgcatggcccaagccattgtcagggacatcggtcccgacggtgggtggcctaccctcaccaagaccaactacgtcgagtgggccgcggtgatgagggtacggctccaggttcgccacatgtgggaagcagttcgttacgacgacgtcgactaccacgaggatcggcgggcgctggatgctctcattgctgcagtcccgcccgagatgcagttttcgctttcccagaagcggactgccaaggaggcctgggacgccatcgctgcgacccgcatcggcagcgatcgtgcccgcaagaccacactgcaggcacttcgcaaggagtgggagaacctggctttcatgccaggtgaggatgttgatgactttgctctccgcctcaacactctgttgcagaagatggtgcagttcggcgacgacacctacgatgaggagagagctgttgagaagctcttccgttgcatccccgagaagtacaggcagattgctcgctcgatcgagtctctgctagacctctccacgatgacgatcgaagaggcgattggtcgcctcaaggtggtcgacggcgacgaaccacaggctctctctgggcctatcactatcggcgggaagctacatctcactcgggagcagtgggaggcctgccagggtgacaagaaggagtcctcctcgacacgaggccgcaaacgcggcaagccgcgcaaggcgcgtggaggcgcccaggccggggcgcgaggacatgctgagggtggtgcacgtggaggtgcccaaggcggcgccgtcggcaacaagaagccgacacgagacgacggctgccacaactgcggcaagcttggccactgggccagggattgtcggcagccacgacgtggccaggccaacgacgcacaggcggaggcggaggaggaggccctgctcctggcacatgcaagcatcgagccatctccagcggcaccggccgcagcggcactcctccaccttgatgagtcgaaagcacgcgctttcctcggcgacggctccaacaaggacatgatcgaaggatggtgcctcgacaccggcgccactcatcacatgaccggccgacgggagttcttcaccgagcttgactctagcgtccgaggctccgtcaagtttggggacgcctccggtgtagagatcaagggcgccggctcagtcgtcttcaccgccacgtctggtgagcacaggctgctcaccggagtctactacatccccgcgttgagaaactctatcatcagtttgggacagctggatgagaacggttcgcgcgtggaggtcgagcacggagtcatgaggatctgggatccctctcgtcgccttcttgccaaggtacgcaggagtgcaaatcggctttacatcctcaatgtgaaggtggcacaaccttgctgccttgctgctcgtcgagacgacggggcatggcagtggcacgagcgcttcgggcaccttaacttcgaagccttgaagcggctcagcgccaaggagatggtacgaggcctgccgtgccttgaccatgtggagcaattctgcgatgtctgcgtgttgacaaagtagagactgctccccttcccccagcagtcgagcttccgagccaaggagaggctcgagctcgtgcatggggacttgtgtggcccggtgacaccagccacaccaggaggacgacgctacttcttgctgctcgtcgacgatctctcccgctacatgtgggtgatgatccttggcagaaagggagaggctgcgaacgccatcaggcgtgtgcaggtcgctgcggaggcggagtgcggccgcaagctgtgatggaataagtcttgagcatctagaggacagcctgcttttgactgtcctctgtagtcctttagcatctagaggacagcttgactgtcctctgtagtctctttagcatctagaggacagcagtcgctttttgactgtcctctgtagtcgctttagcatctagaggacagcagtcgcttttgactgtcctctgtagtctctttagcatctagaggacaatcctgttgtatagtgtgtgtgagaaggtgtggtagtgcagcccctagggctataaatatgtgtccccaacccctctaagggtatggcattgtgtagtgtttgaggaaataaacagaaaattgccccaactcatagtgtcatcctcttgatgagagttagagtccctctacttacaattggtatcagagccaaactatcctgcagcctaaacatctcgtgttcatctccttcccgcgcctctccccacactcagtcggcagcaagagctccaactgttcctccctcccctgctcagacgagcagcctttcgtctgagacagcctcttccacacgcagcgacccctcactagcccgccatgtccctacgctcggccacttcgagtgcgcggcgccagcaggaggccgaggtcgccgcggcacaagaacgcgagcgagcagcagcagcggctgcagcgacagcgacgagggcagcacggttggcggcggcggaactggcagcggcgagagcggaagtagaagcagcggaggcggcggatgctgcacgtgcggcggcaacagagcttgaggttctgcgcggcagtagagctggcagctctgcttctgtcgacgacaacaccgacgaagagctcaggctggcgagggaagcagcgcgagagcaggcggcacagtgggcagtcgcgcatccccatgggggcgcgcgtggcggcagcccggataggcgtcgacacgctgacggcgctccaggcgggggcgcacgcggcggcagcccagacgggcgtagacgcgccggcggtgctcccggcggcggcgaccgagttgacggagatcgcggcctctacaggcggcgcggttctccctccccggatcggtaccatggtcgtcgcatggcccaagccattgtcagggacatcggtcccggcggtgggtggcctaccctcaccaagaccaactacgtcgagtgggccgtggtgatgagggtacggctccaggttcgccacatgtgggaagcagttcgttacgacgacgtcgactaccacgaggatcggcgggcgctggatgcccccattgctgcagtcccgcccgagatgcagttttcgctttcccagaagcggactgccaaggaggcctgggacgccatcgctgcgacccgcatcggcagcgatcgtgcccgcaagaccacactgcaggcacttcgcaaggagtgggagaacatgaccttcaagccaggtgaggatgttgatgactttgctctccgcctcaacactctgttgcagaagatggtgcagttcggcgacgacacctacgatgaggagagagctgttgagaagctcttccgttgcatccccgagaagtacaggcagattgctcgctcgatcgagtctctgctagacctctccacgatgacgatcgaagaggcgattggtcgcctcaaggtggtcgacggcgacgaaccacaggctctctctgggcctatccctatcggcgggaagctacatctcactcgggagcagtgggaggcctgccagggtgacaagaagcagggggagtcctcctcgacacgaggccgcaaacgcggcaagccgcgcaaggcgcgtggaggcgcccaggccggggcgcgaggacatgctgagggtggtgcacgtggaggtgcccaaggcggcgccgtcggcaacaagaagccggcacgagacgacggctgccacaactgcggcaagcttggccactgggccagggattgtcggcagctacgacgtggccaggccaacgtcgcacaggcggaggcggaggaggaggccctgctcctggcacatgcaagcatcgagccatctccagcggcaccggccgcagcggcactcctccaccttgatgagtcgaaagcacgcgctttcctcggcgacggctccaacaaggacatgatcgaaggatggtgcctcgacaccggcgccactcatcacatgaccggccgacgggagttcttcaccgagcttgactctagcgtccgaggctccgtcaagtttggggacgcctccggtgtagagatcaagggcgccggctcagtcgtcttcaccgccacgtctggtgagcacaggctgctcaccggagtctactacatccccgcgttgagaaactctatcatcagtttgggacagctggatgagaacggttcgcgcgtggaggtcgagcacggagtcatgaggatctgggatccctctcgtcgccttcttgccaaggtacgcaggagtgcaaatcggctttacatcctcaatgtgaaggtggcacaaccttgctgccttgctgctcgtcgagacgacggggcatggcagtggcacgagcgcttcgggcaccttaacttcgaagccttgaagcggctcagcgccaaggagatggtacgaggcctgccgtgccttgaccatgtggagcaattctgcgatgtctgcgtgttgacaaagtagagactgctccccttcccccagcagtcgagcttccgagccaaggagaggctcgagctcgtgcatggggacttgtgtggcccggtgacaccagccacaccaggaggacgacgctacttcttgctgctcgtcgacgatctctcccgctacatgtgggtgatgatccttggcagaaagggagaggctgcgaacgccatcaggcgtgtgcaggtcgctgcggaggcggagtgcggccgcaagctgtgatggaataagtcttgagcatctagaggacagcctgcttttgactgtcctctgtagtcctttagcatctagaggacagcttgactgtcctctgtagtctctttagcatctagaggacaacagtcgctttttgactgtcctctgtagtcgctttagcatctagaggacagcagtcgcttttgactgtcctctgtagtctctttagcatctagaggacaatcctgttgtatagtgtgtgtgagaaggtgtggtagtgcagcccctagggctataaatatgtgtccccaacccctctaagggtatggcattgtgtagtgtttgaagaaataaacagaaaattgccccaactcatagtgtcatcctctgatgagagttagagtccctctacttacaattggtatcagagccaaactatcctgcagcctaaacatctcgtgctcatctccttcccgtgcctctccccacactcagtcggtagcaagagctccaactgttccttcctcccctgctcaaacgagcagcctttcgtctgagacagcctcttccacacgcagcgacccctcactagcccaccatgtccctacgctcggccacttcgagtgcgcggcgccagcaggaggccgaggtcgccgcggcacaagaacgcgagcgagcagcagcagcggctgcagcgacagcggcgagggcagcacggttggcggcggcggaactggcagcggcgagagcggaagtagaagcagcggaggcggcggatgctgcacgtgcggcggcaacagagctcgaggttctgcgcggcagtagagctggcagctctgcttctgtcgacgacaacaccgacgacgagctcaggctggcgagggaagcagcgcgagagcaggcggcacagtgggcagccgcgcatccccatgggggcgcgcgtggcggcagcccggataggcgccgacacgctgacggcgctccaggcgggggcgcacgcggcggcagcccagacgggcgtagacgcgccggcggtgctctcggcggcggcgaccgagtcgacggagatcgcggcctctacaggcggcgcggttctccctccccggatcggtaccatggtcgtcgcatggcccaagccattgtcagggacatcggtcccgacggtgggtggcctaccctcaccaagaccaactacgtcgagtgggccgcggtgatgagggtacggctccaggttcgccacatgtgggaagcagttcgttacgacgacgtcgactaccacgaggatcggcgggcgctggatgctctcattgctgcagtcccgcccgagatgcagttttcgctttcccagaagcggactgccaagaaggcctgggacgccatcgctgcgacccgcatcggcagcgatcgtgcccgcaagaccacactgcagacacttcgcaaggagtgggagaacctggccttcaagccaggtgaggatgttgatgactttgctctctgcctcaacactctgttgcagaagatggtgcagttcggtgacgacacctacgatgaggagagagctgttgagaagctcttccgttgcatccccgagaagtacaggcagattgctcgctcgatcgagtctctgctagacctctccacgatgacgatcgaagaggcgattggtcgcctcaagggggtcgacggcgacgaaccacaggctctctctgggcctatcactatcggcgggaagctacatctcactcgggagcagtgggaggcctgccagggtgacaagaagcagggggagtcctcctcgacacgaggccgcaaacacggcaagccgcgcaaggcgcgtggaggcgcccaagccggggcgcgaggacatgctgagggtggtgcacgtggaggtgcccaaggcggcgccgtcggcaacaagaagccggcacgagacgacggctgccacaactgcggcaagcttggccactgggccagggattgtcggcagccacgacgtggccaggccaacgtcgcacaggcggaggcggaggaggaggccctgctcctggcacatgcaagcatcgagccatctccagcggcaccggccgcagcggcactcctccaccttgacgagtcgaaagcacgcgctttcctcggcgacggctccaacaaggacatgatcgaaggatggtgcctcgacaccggcgccactcatcacatgaccggccgacgagagttcttcaccgagcttgactctagcgtccgaggctccgtcaagtttggggacgcctccggcgtagagatcaagggcgccggctcagtcgtcttcaccgccgcgtctggtgagcacaggctgctcaccggagtctactacatccccgcgttgaggaactctatcatcagcttgggacagctggatgagaacggttcgcgcgtggaggtcgagcacggagtaatgaggatctgggatccctctcgtcgccttcttgccaaggtacgcaggagtgcaaatcggctttacatcctcaatgtgaaggtggcacaaccttgctgccttgctgctcgtcgagacgacggggcatggcagtggcacgagcgcttcgggcaccttaacttcgaagccctgaagcggctcagcgccaaggagatggtacgaggcctgccgtgccttgaccatgtggagcaattctgcgatgtctgcgtgttgacaaagcagagacgactccccttcccccagcagtcgagcttccgagccaaggagaggctcgagctcgtgcatggggacttgtgtggcccggtgaccccagccacaccaggaggacgacgctacttcttgctgctcgtcgacgatctctcccgctacatgtgggtgatgatccttggcagaaagggagaggctgcgaacgccatcaggcgtgtgcaggtcgctgcggaggcggagtgcggccgcaagctgtgatggaataagtcttgagcatctagaggacagcctgcttttgactgtcctctgtagtcctttagcatctagaggacagcttgactgtcctctgtagtctctttagcatctagaggacaatcctgttgtgtagtgtgtgtgagaaggtgtggtagtgcagcccctagggctataaatatgtgtccccaacccctctaagggtaatggcattgtgtagagtttgaggaaataaacagaaaattgccccaactcatagtgtcatcctcttgatgagagttagagtccctctacttacaattggtatcagagccaaactatcctgcagcctaaacatctcttgctcatctccttcccgcgcccctccccacactcagtcggcagcaagagctccaactgttccttcctcccctgctcagacgagcagcctttcgtctgagacagcctcttccacacgcagcgacccctcactagcccacgatgtccctacgctcggccacttcgagtgcgcggcgccagcaggaggccgaggtcgccgcggcacaagaacgcgagcgagcagcagcagcggctgcagcgacagcggcgagggcagcacggttggcggcggcggaactggcagcggcgagagcggaagtagaagcagcggaggcggcggatgctgcacgtgcggcggcaacagagctcgaggttctgcgcggcagtagagctggcagctctgcttctgtcgacgacaacaccgacgacgagctcaggctggcgagggaagcagcgcgagagcaggcggcacagtgggcagccgcacatccccatgggggcgcgcgtggcggcagcccggataggcgccgacacgctgacggcgctccaggcgggggcgcacgcggcggcagcccagacgggcgtagacgcgccggcggtgctcccggcggcggcgaccgagtcgacggagatcgcggcctctacaggcggcgcggttctccctccccggatcggtaccatggtcgtcgcatggcccaagccattgtcagggacatcggtcccggcggtgggtggcctaccctcaccaagaccaactacgtcgagtgggccgcggtgatgagggtacggctccaggttcgccacatgtgggaagcagttcgttacgacgacgtcgactcccacgaggatcggcgggcgctggatgctctcattgctgcagtcccgcccgagatgcagttttcgctttcccagaagcggacagccaaggaggcctgggacgccatcgctgcgacccgcatcggcagcgatcgtgcccgcaagaccacactgcaggcacttcgcaaggagtgggagaacctggccttcaagccaggtgaggatgttgatgactttgctctccgcctcaacactctgttgcagaagatggtgcagttcggcgacgacacctacgatgaggagagagctgttgagaagctcttccgttgcatccccgagaagtacaggcagattgctcgctcgatcgagtctctgctagacctctccacgatgacgatcgaagagtcgattggtcacctcaaggtggtcgacggcgacgaaccacaggctctctctgggcctatcactatcggcgggaagctacatctcactcgggagcagtgggaggcctgccagggtgacaagaagaagggggagtcctcctcgacacgaggccgcaaacgcggcaagccgcgcaaggcgcgtggaggcgcccaggccggcgcgcgaggacatgctgagggtggtgcacgtggaggtgcccaaggcggcgccgtcggcaacaagaagccggcacgagacgacggctgccacaactgcggcaagcttggccactgggccagggattgtcggcagccacgacgtggccaggccaatgtcgcacaggcggaggcggaggaggaggccctgctcctggcacatgcaagcatcgagccatctccagcggcaccggccgcagcggcactcctccaccttgatgagtcgaaagcacgcgctttcctcggcgacggctccaacaaggacatgatcgaaggatggtgcctcgacaccggcgccactcatcacatgaccggccgacgggagttcttcaccgagcttgactctagcgtccgaggctccgtcaagtttggggacgcctccggcgtagagatcaagggcgctggctcagtcgtcttcaccgccgcgtctggtgagcacaggctgctcaccggagtctactacatccccgcgttgaggaactctatcatcagcttgggacagctggatgagaacggttcacgcgtggaggtcgagcacggagtcatgaggatttgggatccctctcgtcgccttcttgccaaggtacgcaggagtctaaatcggctatacatcctcaatgtgaaggtggcacaaccttgttgtcttgctgctcgtcgagacgatggggcatggcagtggcacgagcgctttgggcaccttaacttcgaggccctgaagcggctcagtgccaaggagatggtacgaggcctgccgtgccttgaccatgtggagcaattctgcgatgtctgcgtgttgacaaagcagagatggctcccctttccccagcagtcgagcttccgagccaaggagaggcttgagctcgtgcatggggacttgtgtggcccggtgacaccagccacaccaggaggacgacgctacttcttgctgctcgtcgacgatctctcccgctacatgtgggtgatgatccttggcagcaagggagaggctgcgaacgccatcaggcgtgtgcaggtcactgcggaggcggagtgcggccgcaagctgcgcgtgctgcgcaccaacaacggcggcgaattcacgacggctgagttcgcgtcgtactgcgcggatgagggcgttcagcgccactactccgcgccgtacagcccgcagcagaacggcgtcgtcgagcggcgcaaccagacggttgtggggatggctcgggctctcctcaagcagagaggaatgccagctgtcttctggggagaggcggtggtgacagcgggttacatcctcaaccgctcgcccaccaaggctctcaacgggatgacaccgtacgaggcttggcatgggcgcaagccggcggtctctcacctacgggtcttcggctgcctcgcgttcaccaaggagcttggccacatcagcaagctcgacgataggagcaccccgggggtgttcattggctacgcggagggctcgaaggcctaccgcatctttgacccaagaacacagcgtgtgcgcacggcgcgcgacgtagtgttcgacgaagggcgaggttgggcgtgggacaaggcggtggacgacggcacgactccgacgtacgacttcaccatcgagtacgtccactttgagggagctgggggagtaggcaactcttctccgagcaggtctaccccagcccccaagtctccaccgcctccagcgccactctctccagctcctgctacaacgagctcttcaccaccacgcactccagccacgactccggctacagcgagctcttcgccaccacgtactccagcaccgacggtaccctctccgggaacgtcctctccgacaccagctcgtgtcgagcacgacccagtggagctcgtgacccctctgtcccgcgacgaggagcgcgtcgacgcgtgctacgccggcgagccgttgcggtatcgaagggtggagggccttctcatcgacccgtcggtgccaggccctgcatctcgcattctggcaggagagttgcatcttgcatgcgacgatggtgagcctcggtctttcgcggaggccgagcaacatgcggcttggcgtgccgcgatgcagtcggagatggacgcggttgagacgaaccgcacttgggagctcgctgatctccctcatggtcatcgcgcgatcacccttaagtgggtgttcaaactgaagagggatgaagccggcgccatcgtcaagcataaggctcgcttggtggcacgcggtttcttgcagcaggaggggatcgacttcgacgatgccttcgcccctgtagcacggatggaatccgtgcgactccttgcgctggcagccctggagggctggcatgttcatcacatggatgtcaagtcggcgtttcttaacggcgacttaaaggaggaggtctatgtacaccagccgccaggttttgcgatccctggcaaggagggcaaggtgttgcgcctgcgcaaggctctctacggcttgcgacaggcaccaagggcgtggaatgccaagctggattccacgctcaagaggatgggcttcatgccaagcccgcacgaggcggccatctatcgacggggcaatggagaaaatgccctgctggtgggtgtctacgtcgacgacttggtgatcaccggcgccaaggatgcagaggtggcagcgttcaaggaagagatgaaggccaccttccaaatgagtgacctggggcatctctccttctacctggggattgaggtgcaccagggagactccgggatcacacttcgccagaccgcctacgccaagcgcattgttgagctggctgggctcatcgactgcaacccagctctcactccgatggaggagaggctgaagctgagtcgcgacagcacgacgaaggaggtggatgctacacagtaccggcgtcttgtggggagccttcgctacctcgtccacacacggcctgacttggcatactccgtcggctacgttagtcggtttctgcagcgatcgacgacggagcatgagcaggctgtgaagaggatcatccgctatgttgcggggactctcgaccacggtctctactacccgaggtgccctggggaggcacaccttgtcgggtacagcgatagcgaccacgccggcgacatcgacaccagcaagagcacaagcgggatcctcttcttcctcggcaagtgccccatcagctggcagtcggtcaagcagcaggtggtggccatgtccagctgcgaggccgagtacatagcagcgtccactgcttcgactcaggctctctggctggctcgactgctcggtgatctcctcgggagagacactggagcggtggaactcagggtggacagccagtccgctctggcattggccaagaaccccgtgttccatgaacggagcaagcacatccggctgagataccacttcatccgagactgcttggcagaagggagcatcaaggcgtgctacatcaacaccaaggatcagcttgcagacctgctcaccaagccccttgggaagatcaagtttgttgagctttgctccaggtccgggatggcccaactttctcacaagacgacgcccaagacttagggggagaatgatggaataagtcttgagcatctagaggacagcctgcttttgactgtcctctgtagtctctttagcatctagaggacagcagtcgctttttgactgtcctctgtagtcgctttagcatctagaggacagcagtcgcttttgactgtcctctgtagtctctttagcatctagaggacaatcctgttgtatagtgtgtgtgagaaggtgtggtagtgcagcccctagggctataaatatgtgtccccaacccctctaagggtatggcattgtgtagtgtttgaggaaataaacagaaaattgccccaactcatagtgtcatcctcttgatgagagttagggtccctctacttacaagctgcgcgtgctgcgcaccgacaacggcggcgaattcacggcggctgagttcgcgtcgtactgcgcggatgagggcgttcagcgccactactccgcgccgtacagcccgcagcagaacggtgtcgtcgagcggcgcaaccagacggttgtggggatggctcgagctctcctcaagcagagaggaatgccagctgtcttctggggagaggcggtggtgacagcggtttacatcctcaaccgctcgcccaccaaggctctcaacgggatgacaccgtacgagacttggcatgggcgcaagccggcggtctctcacctacgggtcttcggctgcctcgcgttcaccaaggagcttggccacatcagcaagctcgacgataggagcaccccgggggtgttcattggctacgcggagggctcgaaggcctaccgcattcttgacccaagaacacagcgtgtgcgcacggcgcgcgacgtagtgttcgacgaagggcgaggatgggcgtgggacaaggcggtggacgacggcacgactccgacgtacgacttcaccatcgagtacgtccaatttgagggagctgggggagtaggcaactcttctccgagcaggtctaccccagcccccaagtctccaccaactccagcgccacactctctagctcctgctacaacgagctcttcaccaccacgcactccagccacgactccggctacagcgagctcttcgccaccacgtactccagcaccgacggtaccctctctgggaacgtcctctccgacaccagctcgtgtcgagcacgacccagtggagctcgtgacccctctgtcccgcgacgaggagcgcgtcgacgcgtgctacgccggcgagccgttgcggtatcgaagggtggagggccttctcatcgacccgtcggtgccaggccctgcatctcgcattctggcaggagagttgcatcttgcatgcgacgatggtgagcctcggtctttcgcggaggccgagcaacatgcggcttggcgtgccgcgatgcagtcggagatggacgcggttgagacgaaccgcacttgggagctcgctgatctccctcatggtcatcgcgcgatcacccttaagtgggtgttcaaactgaagagggatgaagccggcgccatcgtcaagcataaggctcgcttggtggcacgcggtttcttgcagcaggaggggatcgacttcgacgatgccttcgcccctgtagcacggatggaatccgtgcgactcctcctcgcgttggcagccctgaagggctggcatgttcatcacatggatgtcaagtcggcgtttcttaacggcgacttaaaggaggaggtctacgtacaccagccgccaggttttgcgatccctggcaaggagggcaaggtgttgcgtctgcgcaaggctctctacggcttgcgacaggcaccaagggcgtggaatgccaagctggattccacgctcaagaggatgggcttcatgccaagcccgcacgaggcggccatctatcggcggggcaatggaggaagtgccctgctggtgggtgtctacgtcgacgacttggtgatcaccggcgccaaggatgcagaggtggcagcattcaaggaagagatgaaggccaccttccaaatgagtgacccggggcacctctccttctacctggggattgaggtgcaccagggggactccgggatcacacttcgccagaccgcctacgccaagcgcattgttgagctggctgggctcaccgactgcaacccagctctcactccgatggaggagaggctgaagctgagtcgcgatagcacgacggaggaggtggacgctacacagtaccggcatcttgtggggagccttcgctacctcgtccacacacagcctgacttggcatactccgtcggctacgttagtcggtttctgcagcgaccgacgacggagcatgagcaggctgtgaagaggatcatccgctatgttgcggggactctcgaccacggtctctactacccgaggtgccctggggaggcacaccttgtcgggtacagcgatagcgaccatgccggcgacatcgacaccagcaagagcacaagcggaatcctcttcttcctcggcaagtgccccatcagctggcagtcggtcaagcagcaggtggtggccatgtccagctgcgaggtcgagtacatagcggcgtccactgcttcggctcagacgctctggctggctcgactgctcggtgatctcctcgggagagacactggagcggtggaactcagggtggacagccaatctgctctggcattggccaagaaccccgtgttccatgaacggagcaagcacatccggctgagataccacttcatccgagcctgcttggcagaagggagcatcaaggcgcgctacatcaacaccaaggatcagcttgcagacctgctcaccaagccccttggtaagatcaagtttgttgagctttgctacaggtccgggatggcccaactttctcacaagacgacgcccaagacttagggggagaatgatggaataagtcttgagcatctagaggacagcctgcttttgactgtcatctgtagtcctttagcatctagaggacagcttgactgtcctctgtagtctatttagcatctagaggacagcagtcgcttttttgactgtcctctgtagtcgctttagcatctagaggacaacagtcgcttttgactgtcctctgtagtcgctttagcatctagaggacaatcctgttgtgtagtgtgtgtgagaaggtgtggtagtgcagcccctagggctataaatatgtgtccccaacccctctaagggtatgccattgtgtagtgtttgaagaataaacagaaaattgccccaactcatagtgtcatcctcttgatgagagttagagtccctctacttacagagccatctccagcggcaccggccgcagcggcactcctccaccttgatgagtcgaaagcacgcgttttcctcggcgacggctccaacaaggacatgatcgaaggatggtgcctcgacaccggcgccactcatcacatgaccggccaacgggagttcttcaccgagcttgactctagcgtccgaggctccgtcaagtttggggacgcctccggcgtagagatcaagggcgccggctcagtcgtcttcaccgccgcgtctggtgagcacaggctgctcaccggagtctactacatccccgcgttgagtaactctatcatcagcttgggacagctggatgagaacggttcgcgcgtggaggtcgagcacggagtcatgaggatctgggatccctctcgtcgccttcttgccaaggtacgcaggagtccaaatcggctatacatcctcaatgtgaaggtggcacaaccttgctgccttgctgctcgtcgagacgacggggcatggcagtggcacgagcgcttcgggcaccttaacttcgaagccctgaagcggctcagcgccaaggagatggtacgaggcctgccgtgccttgaccatgtggagcaattctgcgatgtctgcgtgttgacaaagcagagacgactcccctttccccagcagtcgagcttccgagccaaggagaggctcgagctcgtgcatggggacttgtgtggcccggtgacaccagccacaccaggaggacgacgctacttcttgctgctcgtcgacgatctctcccgctacatgtttgtgatgatccttggcagcaagggagaggctgcgaacgccatcaggcgtgtgcaggtcgctgcggaggcggagtgcggccgcaagctgcgcgtgctgcgcaccgacaacggcggcgaattcacggcggctgagttcgcatcgtactgcgcggatgagggcgttcagcgtcactactccgcgccgtacagcccgcagcagaacggcgtcgtcgagcggcgcaaccagacggttgtggggatggctcgggctctcctcaagcagagaggaatgccagctgtcttctggggagaggcggtggtgacagcgggttacatcctcaaccgctcgcccaccaaggctctcaacgggatgacaccgtacgaggcttggcatgggcgcaagccggcggtctctcacctacgggtcttcggctgcctcgcgttcaccatggagcttggccacatcagcaagctcgacgataggagcaccccgggggtgttcattggctacgcggagggctcgaaggcctaccgcattcttgacccaagaacacagcgtgtgcgcacggcgcgcgacgtagtgttcgacgaagggcgaggatgggcgtgggacaaggcggtggacgacggcacgactccgacgtacgacttcaccatcgagtacgtccaatttgagggagctgggggagtaggcaactcttctccgagcaggtctaccccagcccccaagtctccaccaactccagcgccacactctctagctcctgctacaacgagctcttcaccaccacgcactccagccacgactccggctacagcgagctcttcgccaccacgtactccagcaccgacggtaccctctccgggaacgtcctctccgacaccagctcgtgtcgagcacgacccagtggagctcgtaacccctctgtcccgcgacgaggagcgcgtcgacgcgtgctacgacggcgagccgttgcggtatcgaagggtggagggccttctcctcgacccgtcggtgccaggccctgcatctcgcattctggcgggagagttgcatcttgcatgcgacgatggtgagcctcggtctttcgcggaggccgagaaacatgcggcttggcgttctgcgatgcagtcggagatggacgcggttgagacgaaccgcacttgggagctcgctgatctccctcatggtcatcgcgcgatcacccttaagtgggtgttcaaactgaagagggatgaagtcggcgccatcgtcaagcataaggctcgcttggtggcacgcggtttcttgcagcaggaggggatcgacttcgacgatgccttcgcccctgtagcacggatggaatccgtgcgactcctcctcgcgctggcagccctggagggctggcatgttcatcacatggatgtcaagtcggcatttcttaacggcgacttaaaggaggaggtctacgtacaccagccgccaggttttgcgatccctggcaaggaaggcaaggtgttgcgcctgtgcaaggccctctacggcttgcgacaggcaccaagggcgtggaatgccaaactggattccacgctcaagaggatgggcttcatgccaagcccgcacgaggcggccatctatcggcggggcaatggagaaaatgccctgctggtgggtgtctacgtcgatgacttggtgatcaccggcgccaaggatgcagaggtggcagcattcaaggaagagatgaaggccaccttccaaatgagtgacccggggcacctctccttctacctggggattgaggtgcaccagggggactccgggatcacacttcgccagaccgcctacgccaagcgcattgttgagctggctgggctcaccgactgcaacccagctctcactccgatggaggagaggctgaagctgagtcgcgatagcacgacggaggaggtggacgctacacagtaccggcgtcttgtggggagccttcgctacctcgtccacacacagcctgacttggcatactccgtcggctacgttagtcggtttctgcagcgaccgacgacggagcatgagcaggctgtgaagaggatcatccgctatgttgcggggactctcgaccacggtctctactacccgaggtgccctggggaggcacaccttgtcgggtacagcgatagcgaccatgccggcgacatcgacaccagcaagagcacaagcggaatcctcttcttcctcggcaagtgccccatcagctggcagtcggtcaagcagcaggtggtggccatgtccagctgcgaggtcgagtacatagtggcgtccactgcttcggctcagacgctctggctggctcgactgctcggtgatctcctcgggagagacactggagcggtggaactcagggtggacagccaatccgctctggcattggccaagaaccccgtgttccatgaacggagcaagcacatccgactgagatagcacttcatccgagcctgcttggcagaagggagcatcaaggcgcgctacatcaacaccaaggatcagcttgcagacctgctcaccaagccccttggtaagatcaagtttgttgagctttgctccaggtccgggatggcccaactgtctcacaagacgacgcccaagacttagggggagaatgatggaataagtcttgagcatctagaggacagcctgcttttgactgtcatctgtagtcctttagcatctagaggacagcttgactgtcctctgtagtctctttagcatctagaggacagcagtcgcttttttgactgtcctctgtagtcgctttagcatctagaggacaacagtcgcttttgactgtcctctgtagtcgctttagcatctagaggacaatcctgttgtgtagtgtgtgtgagaaggtgtggtagtgcagcccctagggctataaatatgtgtccccaacccctctaagggtatgccatagtgtagtgtttgaagaaataaacagaaaattgccccaactcatagtgtcatcctcttgatgagagttagagtccctctacttacagagccatctccagcggcaccggccgcagcggcactcctccaccttgatgagtcgaaagcacgcgttttcctcggcgacggctccaacaaggacatgatcgaagaatggtgcctcgacaccggcgccactcatcacatgaccggccaacgggagttcttcaccgagcttgactctagcgtccgaggctccgtcaagtttggggacgcctccggcgtagagatcaagggcgccggctcagtcgtcttcaccgccgcgtctggtgagcacaggctgctcaccggagtctactacatccccgcattgagtaactctatcatcagcttgggacagctggatgagaacggttcgcgcgtggaggtcgagcacggagtcatgaggatctgggatccctctcgtcgccttcttgccaaggtacgcaagagtccaaatcggctatacatcctcaatgtgaaggtggcacaaccttgctgccttgctgctcgtcgagacgacggggcatggcagtggcacgagcgcttcgggcaccttaacttcgaggccctgaagcggctcagtgccaaggagatggtgcgaggcctgccgtgccttgaccatgtggagcaattctgcgatgtctgcgtgttgacaaagcagagacggctcccctttccccagcagtcgagcttccgagccaaggagaggctcgagctcgtgcatggggacttgtgtggcccggtgacaccagccacaccaagaggacgacgctacttcttgctgctcgtcgacgatctctcccgctacatgtgggtgatgatccttggcagcaagggagaggctgcaaacgccatcaggcgtgtgcaggtcgctgcggaggcggagtgcggccgcaagctgcgcgtgctgcacaccgacaacggcggcgaattcacggcggctgagttcgcgtcgtactgcgcggatgagggcgttcagcgccactactccacgccatacagcccgcagcagaacggcgtcgtcgagcggcgcaaccagacggttgtggggatggctcgggctctcctcaagcagagaggaatgccagctgtcttctggggagaggcggtggtgacagcgggttacatcctcaaccgctcgcccaccaaggctctcaacgggatgacaccgtacgaggcttggcatgggcgcaagccggcggtctctcacctacgggtcttcggctgcctcgcgttcaccaaggagcttggccacatcagcaagctcgacgataggagcaccccgggggggttcattggctacgcggagggctcgaaggcctaccgcatccttgacccaagaacacagcgtgtgcgcacggcgcgcgacgtagtgttcgacgaagggcgaggatgggcgtgggacaaggcggtggacgacggcacgactccgacgtacgacttcaccatcgagtacgtccactttgagggagctgggggagtaggcaactcttctccgagcaggtctaccccagcccccaagtctccaccgactccagcgccacactctccagctcctgctacaacgagctcttcaccaccacgcactccagccacgactccggctacagcgagctcttcgccaccacgtactccagcaccgacggtaccctctccgggagcgtcctctccgacaccagctcgtgtcgagcacgacccagtggagctcgtgacccctctgtcccgcgacgaggagcgcgtcgacgcgtgctacgacggcgagccgttgcggtatcgaagggtggagggccttctcatcgacccgtcggtgccaggccctgcatctcgcattctggcaggagagttgcatcttgcatgcgacgatggtgagcctcggtctttcgcggaggccgagaaacatgcggcttggcgtgctgcgatgcagtcggagatggacgcggttgagacgaaccgcacttgggagctcgctgatctccctcatggtcatcgcgcgatcacccttaagtgggtgttcaaactgaagagggatgaagccagcgccatcgtcaagcataaggctcgcttggtggcacgcggtttcttacagcaggaggggatcgacttcgacgatgccttcgcccctgtagcacggatggaatccgtgcgactcctccttgcgctggcagccctggagggctggcatgttcatcacatggatgtcaagtcggcgtttcttaacggcgacttaaaggaggaggtctacgtacaccagccgccaggttttgcgatccctggcaaggagggcaaggtgttgcgcctgcgcaaggctctctacggcttgcgacaggcaccaagggcgtggaatgccaagctggattccacgctcaagaggaagggcttcatgccaagcccgcacgaggcggccatctatcggcggggcaatggagaaaatgccctgctggtgggtgtctacgtcgacgacttggtgatcaccggcgccaaggatgcagaggtggcagcattcaaggaagagatgaaggccaccttccaaatgagtgacttggggcatctctccttctacctggggattgaggtgcaccagggagactccgggatctcacttcgccagaccgcctatgccaggcgcattgttgagctggctgggctcaccgactgcaacccagctctcactccgatggaggagaggctgaagctgagtcgcgacagcacgacggaggaggtggatgctacacagtaccggcgtcttgtggggagccttcgctacctcgtccacacacgacctgacttggcatactccgtcggctacgttagtcggttcttgcagcgaccgacgacggagcatgagcaggctgtgaagaggatcatccgctatgttgcggggactctcgaccacggtctctactacccgaggtgccctggggaggcacaccttgtcgggtacagcgacagcgaccacgccggcgacatcgacactagcaagagcacaagcgggatcctcttcttcctcggcaattgcctcattagctggcagtcggtcaagcagcaggtggtggccatgtccagctgcgaggccgagtacatagcggcgtccactgcttcgactcaggcgctctggctggctcgactgctcgnnnnnnnnnnnnnnnnnnnnnnnnnnnnnnnnnnnnnnnnnnnnnnnnnnnnnnnnnnnnnnnnnnnnnnnnnnnnnnnnnnnnnnnnnnnnnnnnnnnnnnnnnnnnnnnnnnnnnnnnnnnnnnnnnnnnnnnnnnnnnnnnnnnnnnnnnnnnnnnnnnnnnnnnnnnnnnnnnnnnnnnnnnnnnnnnnnnnnnnnnnnnnnnnnnnnnnnnnnnnnnnnnnnnnnnnnnnnnnnnnnnnnnnnnnnnnnnnnnnnnnnnnnnnnnnnnnnnnnnnnnnnnnnnnnnnnnnnnnnnnnnnnnnnnnnnnnnnnnnnnnnnnnnnnnnnnnnnnnnnnnnnnnnnnnnnnnnnnnnnnnnnnnnnnnnnnnnnnnnnnnnnnnnnnnnnnnnnnnnnnnnnnnnnnnnnnnnnnnnnnnnnnnnnnnnnnnnnnnnnnnnnnnnnnnnnnnnnnnnnnnnnnnnnnnnnnnnnnnnnnnnnnnnnnnnnnnnncgagagctgtctcactgagttgtgagtttgaagcagtctttccgcatttgcgcggggggggggtgatggaataagtcttgagcatctagaggacagcctgcttttgactgtcctctgtagtcctttagcatctagaggacaacagtcgctttttgactgtcctctgtagtctctttagcatctagaggacaacaatcgcttttgactgtcctctgtagtcgctttagcatctagaggacagcagtcgctttttgactgtcctctgtagtctctttagcatctagaggacaatcctgttgtgtagtgtgtgtgagaaggtgtggtagtgcagcccctagggctataaatatgtgtccccaacccctctaagggtatagcattgtgtagtgtttgaggaaataaacagaaaattgacccaactcatagtgtcatcctcttgatgagagttagagtccctctacttacagggggagacttgtctcggtttatccctcccttagaccccactcatgtgggagcctccgacattggatgtactctatttgttttaaatatatgcagataaatattattttctaacaatggtgctaattcatgtataaaagtaaggagtaaaatgcatcaggtccccgaactctcaaaactaggattacgtgtcttcgaacttgacgtcttggccggtcatccaaaaccagatttgctcaaactggatgccgatgtggcgtgccatgttggagtcactttggtccccgaacttggcatgctgtatcacttgggtctcagaacttggcattttgtgccacttggcttcccgaactttctttagtacgcttcagcgtggcatgctacgttggcatcgggtttgaacaaactcggttttggatggccgactaagttcgaggacccgttttgctggttttgaaaattcgatgacccaagtgacaaatcatgctaagttcgaggaccactgatgtattttactcaaagttaagttttgggatgtgtttattgggctagggcatgctagtggggtttctctcgttgcaaaacaggggcttgtttgcaaatagttctaaaggcaccttgtgtgtgaaatgtgggttctgtgtgccaatgtcaacaagttttatggatcttgattatagatcgaattgctagaaatatagtagttcaaacagatattggaactggagctacaatttagtcattaatatactattacttcaagtatgtatgggtatcaactatcaaacataggttgtgtttgcttcagcatctgaaaagtgcttctgctctactttattgtattacaatttaactagcaccttggactatacttttggcttccaaccttttacttctccaaatggttggaaacagaaagaaattttacatgtgtatccagggcatgcttatcaagacgtccattaagcgtcacattagagtcgctttagcgctaaggcgcactcacagggcaaggcgtctagcttgccttgtgctggggagtaagacgtccgccgcggcgtaaggcgctggtggggcgtcggcagggcgttctcggagcgtcggcggggcgacgcttaggggataggtagggttttgaagggcgacggctggaaacagagaagagggtttgacctgtgtctgtgtggcagctgcagctgctgcctccttcctcgtcggcgcgcagtgctccggccatcggaggtgggagactgcggtggaagaaccgagggagagagagagaggagagctgtgggggagggagagagaggggactgaagagagatgcagcgtgagggaaaaatagaggctggcggctgctactaggttgctggcggctgtgacctaaaactgtgttttgggctgagctgggccgagttgggctggactcacttgttgtgaggttctttcctgccttttttttctgcttctactagactgaaattggacatattagaccttataaaagtgctagcttgcttattaactttaaattagtgatatataaataatgtttgatctaatttttttgatatttatctatataactaaggcctcgcctcgccttacgctttatcgcctaaaagataaaagagggttggtcgccttatgtcgccttaccgccttaataactatgatcaagggagagaaagaaaggggtaggcttcatagttgtttcaaccaaacaatttatctttttcatagtgcatagctcacatcatcttttccaaagctcacaactcacaacaacttttctatagcttagttgacccaaacaagcccataattgctttttgtttggacctaccagctaattactcatgtgagagcctctgacactaggtttgtcctactaactaactacacaacacatcataggtacgtaacctttagctctctagaaaacttgggcaagtaattcagccaccctgaaatggtgctctataaatgtctcggcttgccaaattttgtttgggccagccaaaatttgacctccaccttgggctcaactctctgaccatattgggcgcttggatcatatggaatggaaccactgtaactgttgttttattgatttttttctcgaaaagcgcaggagaactgcaccccattatattaagaccgttgtttttattgatgctaagtgtttctgaagccatgatcgtggcaggagaagagcgtcaactttggtctatgacaggggctagaggaatctcctgcttgattgtccccaaggttttgagtgcttttttagatgggacattctatgtctcctttttaatcagtgtgtttgtaactattaaatgtggtgtttgttgtgtgggttgtggttcctaaccgaatttcttcttaatataataaagtgccatctctactgcattttcgagaactttttttgacctccaagtggttgccagattgttggggcacgaccaaattttgattttgcatcctatgagtctcatactaaacgtgtcgtgaatatccttgttttatccatgatcattcatttattcatttgcttgtgccttctgtgtagacatgttttttttgcaggtatatgtgtggttgcacactcataagttgcagttgctactaccttgttagttagtctatggttttgctgctttgattgaaccaaaataaaatgttagttgcaaacttttgtcaactcagctgtgtctgtcatttgtttagtattgtcctccattatcattaaggatcagagactttgtaaatggattagtttttcatgaatgttatgatgaaaaatgatattgttctgttctttaaatatattctttgctcgcaacttatattaattgtccttgggctatgttctcatgtctattgcaggttgaatgtttacttgtagaaggtgtcttgggcaaaaggaatcttgtgtattgtgcatccacgaggtgtttgcagatctttcatgtcgttcatacatggacatacctacacacttcacattctcagatgcgtactgtttttttttcaaattccttttctatctaatcttatgtgtatattttttgttgttaaatttgcagtgctggtaaaagttttgttgctgaagttctgatgttgaggcagatactgtcaactgggaatatggcaattcttgtccttccctatgtgtcaatatgcgctgaaaaggtttttgatgatttatacagctttggattggtctgaaacatacttgtgtttgattatttatttatcttttacaggctgaacatcttgaacaacttcttgagccactgggtaggcatgtccgtagcttctacggaaaccaggggggaggctcacttcctaaagatacagcagttgctgtatgtaccatagagaaggcaaactctttggtaaacaagttgttggaggatggccgcctctctgaacttggtgtaattgtcatagatgaacttcatatggtaagcttgtctaaaaccgaagtgctgctcagaacatcctctctttgctttaaaccttttgttgttggtactttcatggttatttataccacatctattttgttatgcaagttcattgccttaggaactgtcatttcagcaatctaggtttgtgacagcattgagagtactaacgtaattttgtaacatttccattgtttgtaatcttttaatagcatgcacgagataattgccatttaatgaggatatttgttggcctgttgttagctattagtgctccttggccagtgtgcattgtggaattggatttgttttatgaaacagatggagcactagagatctggtactatctggaatctaaaaagtagagcgtgtgcattttgtatgactttcttctttaattaatacaatgatacagaactctcctgcatattgaagaaaaaacgatgtacaattgcattgcaagtagtagaggttttatcattgctaactaagagcactacaaattcttgtataggtggtgtatgtggtattggtgtactgcatatatcaatcagaacttcaaatatgatttttcctctcccccttctctccgcctgggccgttagggagtgaattcagtccaacgcctaggggctagggccaccaatctagtccaagtgatgtacctttccctactgcatcattgtttagttttttaggtgttcttttttgttcaaggtttgggatggttagtcatcaacttatcacccatcctatctaatcaagtaatcttgtgtgttactttacctgttacccgagtttccatattgttaggttataatcattaagagtaatttgtaaataagaaaggtttgtcattatggacaattgccagtaaacaagaaacaacaaggagaagtaccattggtcctggcgctgaatgaattctggcagcatacttatcaaatgcaaatcatataggaagatttgactttccttagggctcccctcatatatttgtaatattaggcccaggaccaatagtctcccagctcgccattcggctaaagcactatggcagtattactatttagcaacccctaccaaaggaagcatatagcttgcatctttacctgtctttgtttacctttccatgcccttgagggttctttcaatctttcttcctgtatcctttgacttagtttgtcgaacatgatgtgatatatagttgaaacttgttaagttctccaattatgcaattaaattaacaggttggtgaccaacatagaggatatcttttagagctgatgttgacaaagcttcgatatgctgctggtgaagggactttacagtcatgtagcggagaagtttcaagttctagcagtgggaagattgcaagtcatgggttgcagataattggtatgagtgctactatgcccaacatcgctgcggtggctgattggcttcaagtaagatatttaattctcctagttttatgtacttaatgaagggatgttttactagtgtgagaaacaacattactaacccacagaagttcaacttagcattgtcgttcatttatcatattagaaagttcaaaggcatttgataaatatgtgagcaattgaacttcctaattccacttgtattttctttcatcaactttttaaggttttttttgctgtctttcttcaaacctatagcctaacatgatatcttcatcaatattatctgatcgtatgatcgaggctactcgtatgaccaccgatcatatgactaatcactattagtcatcgattagttggtctagccagctagtcgaacatttagttgtccatgtgcctagatgacctaatcgaccatgccgagttagtatccatcgctagtctccttcgcgtcgccccacatgggcaacacgggcggaaccaaccctagcaacgcaccttcttcctcacctgattctcctcaccgtcactagagcgcgacttcacaaggaaggcaatggcatgtcattctcctctgcctcgtgatcatcgactctatcaagctcctctaccatggtttgagaaggtgctcctcccagtggccaatctctagattctagatccaccgatctctaggccagacctgcgctggttgggcctatggtggccacacagtggcagtgcagttgtcccctctcctctcacaactcttcgttcgtctttggtgggtgatgcctagatccatcgtcactgtagccggatcaggcatctcccgtgacaacggatctgcggagggcgacaacccttgtggtcccaacttcattttcaagcatgttcgggtgcttctcggctctagcactcggtcaactttggcttggcattggcatgtggcgcaaatgcaatagcaactgcattgctagcttgcatggccaccaaggatgggtgctcttagtgaggcaaacaagtgccaaacctgcaaccatgacataggagatggtgggcttgctcaggcttgcgttggtgtttgtcggtacctcaagactagggtacccactcctactggatcaaggcgggacccctgtggctatccctagtcgcatagccacaggtggtccgccctggctcagaatataggttcgtccgacgaggccgctggcctcaggtgggggccaacttccatgttgggctcttcagatccctagcagcggggctccgaagccgccacatgctccaagtatggggactccctacagctttgcctaggggcctgaccccctctgggtggtcccggacacctgcgtatgctacttgaacctccgacttaaagaggtccggtattgccacgtgtttaggcccgtgccagagggtcccggactcctctgagtaccttccgaacccccaactagtggtgctccggatctgccacgtctacagacactcctggctgattgctccctgctcgggtaaagatccggtgctgccacgtgtcttatggcgtgtgacataagccgtcgggaagagcctggcgtaagcctctggcaaggggaagggccacctgtgttcaaggcgggcagagtgcgcggctgttcacacaagtaatagatggcgcgtaccccgcattaaatgtaggtggcgtgcgcaacctgcaaggcctgcccgcgtcagaatcgcgttaccaaggcaagcccattgcgtagcttggacgcccttcattatgacttctattcctcgcgtgttattgaggcatgagggaacaggcggaggggacgggatgacaccgtccttattctccctacgctcacctacgccgcaacctacgttgtagcctttgcccacatgtcgtagcccctcctcatcttaggattagggcgggtgttatccgtcacctgtctggagtttacctctgaccgtgttgatgtttgtgtggttcgtctctaggtggtctttatagggcacgacaaccatggttggctacaacgagccttgtttgtgggcgtagcttttcacctgcaatggctctgaactagctcgagagttgcatgcggtggtggacgacaatcaacttcaccaggactacatgagtaactatgttgactacacatgttggtgtgaggagagatcttggtgcaagatttggttagtattatcttgagtcgatgatgataacacctttggggggggtgccattcccttttttggaagcgtcgatgaggtgccgtctctccttaccccacgatttgttttgaagaagctctgcctagggtccctaggctggtgatggcggcgcccagcgtcgtatcctgcctgagggcatcaccttgatcccgtactaccatggttgttggtccgcatgggacatttgctgcttgtttgtaagcctcaggttttgatgagttcgctacttgcttaaagcatgtcttttgctctcctagggtagatcaataggtgaagtcagagctgcttttgtggggtgcaacaaagcttggcaatgatgacacattatgttcacttccttcaaaagccgggtcttgttgtgagtaggtggtggtgtgttagggctttggctgatgttcgttgtgggaaatcagatctacgtatcacttttgtgggataagctcgacatcgatgacgtgtggtgtgctctgttggttgtttttgtgtatgtgggttgcttaggattagtcgtatgggttgttgtgtttaggtattggccggttttcctttgataaactgtgtgatgtggtgttttatccctgggtttccttataacctaggtcaattctatttcttaattgaaacttcctagttcctactgcgttaaaaaatgacctgatcaaccatgtatataaataaatttgatataaattggtgaatgggagaggcaagcaaccaagcacattaataacatttccaccttcctctccggcgcggacgtcgcccacctctacgcgtctagcatcgccgccgccgctactacggctccccaggcgttcaccgtgaccaccgccgctgctgcagccactgcggctggactcctacccccaacctctatagcagcctcgacctccctggctacctgacctccacggccgccttcagtgccgcctcgacattcgggactctctccccgaccgacttctcccggcagtcgcccctcggtttcaccgcccgcctgtcgtcgacgtcacttgggctccaccacgtgccgtcgcgccgtccaacgactccgccttggtcgctgccatcgccaccatccaggccgccgtggccgcctcacaggagcgccaacgcgtcgcattactccctctggagcaggaatgggccatgggttaggccctgaccactcagctggccacggctcagcgtatgcttctcggtcgtggcaccccgccaccaccggcagtgcttgcggctcccctggtggtcccggagcctcctcatggctctgggcttgacgtcgacactatcgccgccctccacgcctaggccgctggggttcacaacatacagtccctcatgttggacccgacgtcctcccactaacctcactggcgcgctcaggtggtcctcacccttcggcgtttgccctcactgaccacgtcctcgacgatctcgttgcctcgctgtccccctcctgggtctagatggacaacgtggtcctatcgtggctcaacgacacaatcaccgttgagctgcaggacatcgtctgtgatcaggcagacactgcgcgccagacatggcttgctctcgagggccagttccccaggaaccaggaggctcgggtgctccacctcgacgtccagttccatctgttttctcaggggacctctctgtgggagagtactgccgccagatgaagggcatggcgaactctctccgcgacctcggtgagcctgtcgccgacaacaccaaggtgctgaaccttctacgtggcctcagcccccgctacggccaccggaaggctctcatcaagaggaccgtgcctcaactcccgctatggtcctctcatcaagaggaccatgccgtgcggaacgagcttctttttgagtagctcaccatggagaccgaggctcctccggcatcgacactctacaacgctcctcccggcggtcagacaccctcggggggccaggcctctcgctctccatcgaccgaggcccctgctcgccatccacccgctgtcattgcgactcctcgtccggctttcaccgccgacggaggtcgtcgctccctcaagggcggccgtggggtggcagctccacccgtggtggtccctccggccggggtggcggccaggcgtgaccgtcattctacaacccctggaccaggaccatcgccatgtggccgggctaggcctcgagtgcctcccgctttccggcgtcggccctccagacagcgcctccctacgacgtgccttcgatgcctccctacggcgtgccaccaacgcctccggccgcgccctagcacccgccccgaggaccaccacctcgacgccttggtccccgctggctggcggatggggccctgcatccctcgtcaccgccttcagcaccatggcgatgaccccaccccctccgactgggtggttgattccgagcttcttaccacacaactcccactgcagacacgctctctttgtcccatcccatccattcctcccacccctcctggatcctcgttggcaacgataccactttgccggtcacctcaataggtgcctcggttttccctgggccgttctatctcaacgacgttctcgtagcccctcacataactcacaatcttctttctgttcgtcggttcaccaccgacaacttttgttccattgagtttgacccctctggttttctgtgaaggatctagccacatgacccctctcacccgctgtgacagcgccaagcccctctacacgcttcggccttccaccaccgacgcgtctccacctcccgtcctggtctccaccaccacctctaccacgtgacatcattgtctcggccacccaggacctgatgtcatgaccaaacttaacaacaatttagatccttcatgtagtaggggacattttgatggtctctgtcatgcttgtcagttagaccgacatactcgtctcccattcaccactttttggtttgaggagtcttttgacctggttcattgtgatctctgtacctcccctatactcaatctctttggttataaatactatttggtcattttggatgatttttcccattttctttggacctttcctcttcggttgaagtccgacacgttcaccaccctcacacacttcttcacctaggtctccactcagttccgtcgcccggtccgtgccctacagtgtgacagtggccgcgagttcgacaaccatgcctcccgttctttctttctcaccaacggcgtccagttgcgtctctcgtgcccctacacctctttccagaacggccgggccgaccgcataactctttctcaccatttgctgccttctcttccaggcgtctgtccctgccagctactggggtgaggccctacacaccgccacacaccttctcaactctcttccctcgaaggcggtgagccaccctactcccacttcgccctgtacgacacaaccccttcctacgaccaccttcgcgtgtttggctgtgcctgttatgctaacacttccgccatcgctcctcataagctatctccttgctccactcgctgtctcttccttggctagtcccctgaccacaaagggtattgctgtcttgacctcagctcgcaccgtatcatcatctctcgtcatgtcgtcttcgacgaagatgtgtttccttttgctggctcctcccacccaccgatctcgactccctacttgagtctgatccggttacccctctataagtagatggactctaactctcatcaagaggatgacactataagttcgggcaattttctgtttatttcctcaaacactacacaatgccatacccatctaagggttggagacatatttatagccctagaggttgcactaccacaccttctcacacacactacacaacatgattgtcctctagatgctaaagagactacaaaggacagtcaaaaagcgattgttgtcctctagatgctaaagagactacagaggacagtcaaaaagcgactgttgtcctctagatgctaaagagactacagaggacagtcaaaaagcgactgctgtcctctagatgctaaagagactacagagtacagtcaaaaaacgactgttgtcctctgatgctaaagagactacagaggacagtcaaaaaaacgactgttgtcctctagatgctcaagacttattccatcagcctccaccctaggcgtcccgccttgcgccgttgcctgtaccatgtgcggcctcgacgcctccactcgcgcctctaccggcgcggcgacgacaccgtctacctcctgctctacgtcgatgatattgtgccgacatgcaccgtcgacctcctacagcgcacgatcgtcggccctcagcggtagtttgcgacgaaggacctggggcccctccaccacttcctcggcatcaccgccgaacgctggtcccagggtctcttccttcaccagcgccagtacgccatcgacatcctggagcgggctggcatattcgactgcaagccctgctccacgcctgtcgacacttaggcgaagctctctgaggacggcggcccccggtcgccgacgcgacgtcttaccggagcctgaccggtgcgctccattacctgaccttctctaggcccgacatcgcctacaccatccagcaggtgtgcctgcatatgcacaccccgcgggagccccatctcaccgctcaagcggatcctgtgctacctccgcggctacctcgactacgacctccttctccgaccatccccgacgtcggagctcgtggtctacaccgacgctgactgggccgattgtcccgacacgcgccggtccacttccagttctgccgtgttcctgggcgccaacctcgtctcctgggctgccatgcggcagctcgtcgtctcccgctccagcgccgaggtcgagtattgcgctgtggccaatggtgtggcagaggcctcctagatgcgccagctactacacgagctccacatctctcttcagcgcacaaccctcgtctcttgcggcaatgtcagtgcggtctacctctccaccaaccccgtgcatcatcagagcacgaagcatgtggagatcgacctgcagttcgtccgcgagcgtgtcactgcctgtgacgttcgggttctcagcgtccccaccacgctgcaatacgacgacatcttcaccaaggggttaccgtcgagtgtatttttagactctcgatctagtctcaacatctgatctgtacaagatagagttgcgggggggggggggggnnnnnnnnnngcagattttaaaataaaggtgcacagatttgcttcagctctcttcgcagcctctgtgtgttcggtggttggtaatggggcaaacactctcttctggacagataaatggcttcagggccaatctttgctccagattgcccccgcgctaataaatcgggtgcccgcgaatataagacggcgcagatctgtccaagcagccttaacagccaatggttgggtgcatgatatctctggaagccttacggcgcaggtgctgtttgaatttttattggtttgggatttactccaagaggtgcaactgtaccctaatgtggaggatcaacatcggtggttgccatcctcctcggggctgtattccgccagctctgcttatttgcgcttccatggtggtgcaacaacctttgagcctgctacaagaatctggaagacttgggcccccccgcgctgcaagtatttcatttggcttgcatctctcaaccgatgttggacggctgatcgactggcacgtcatggaatggatcatccagatagttgtcccttgtgtgatcagcaggatgagtcagtgcatcacttgctggtggattgtgtttttacgagggaagtttggtttacaacactaagcaggctaggtttgcaacatcttgctcccacgtctgatgctacannnnnnnnnngggggggggggggtgttagaattccatttacggtttggggttctcctcgtgtaattactctctcacccctgtgtaatgggccatgtcctgttaactcatgtctattaatacatcacccaaccccaagatagagttagggtttcccacactgtgtaatggactaggcctaacaacctgggtctattaatacaactcccaaccctgagttagggttaggttttcccacatgtaatagaggtaggttagtttctctcccccaccccatcccaaccgcccgcttctttcccagcctccggtcgccgtcagctgcatgctctagccgttgtccgccgtgtgctcctccctgtcgtcacatcctgcagccgccgaccccgccatggatcctccccaatccgtccctcccctctccttcgcgctggatgctagcgcggacgccgggcttggtgcgacggcagccgacctcgacatgcgcgccaccgcggccctcgacgcatgcacctcgcccgcgcaccgccgcgaacgccgccgccgtgtacgccgccctaggcgtgaccccctcatcggctgatctgcacggcgccataggcgtgtgccctcccttcgctagctcgctctttccccatggctcgtcgacccgctgcgctcgctgttggcccccctacatcgacggcctcgggcccctccgcggcgcctctcctacgaccttcgctgcacaacagcgccaaggttctctgcctggcttcctcgccctcgctgctcctacatggaccgaggacgtcgcttcctcgtcaggctcctccccaacttcctcgacattggttatggatatcgccaccatccaggcggctgttgcggcctcctaggaccgtgagcgcgccacgactcttgccttggagcgcgagcgcgccatggtgccgacttgaccacccagatggccgtcgcgcaacgcctcctcctcggtcgcagtaccaccccttcaccggtggcccctgggactccccatgcccaagggcttgatgctgacaccatcattaccctccatgcttaggtcgccggggtccacaacattcggtccctcgtgtgtgttatgctggacctggcgtcctcccactaccctcggtgtcgcgcttaggtcatcctcacgcttcggtgatactcccttgttgaccatgtcctcgacgaccccgtcgttccgctgtcaccttcgtgggtacagatggacaacgtgatcctctcgtggctcaacgacaccatcaccatcgagctacaagacatcgtccgtgactaggcgaacaacgcgtaccaggcgtggctcgctctcgagggccagttcctcgggaatcgggaggctcgggcgctccatctcgacgtccagttccacctgttctctcagggggatctctctgtgggagagtactgccgccagatgaagggcatgacaaactctctccgcgacctcggcgagcccatcgccggccatatcttggtgctgaaccttctacatggcctcagcccccgctacggccacctgaaggctttcatcaagaggatcgtgccttttcccacctttcatgctgtgccgaacgagcttctcctcgagggccccgccgatcacatctacgccgcatgaagcacgtgcagcatcagcacacggagcacatggagatcgatctgcactttgtccgtgagcgggtcaccgccggtgacgttcgggttctcagcgtccccaccaagctgcagttcgccgacatcttcaccaaggggctgccgtcgagtgtcttcgccgacttccgatccagtctcaacatctgtacaagatagagactgcggggggggggggnnnnnnnnnnnnnnnnnnnnnnnnnnnnnnnnnnnnnnnnnnnnnnnnnnnnnnnnnnnnnnnnnnnnnnnnnnnnnnnnnnnnnnnnnnnnnnnnnnnnnnnnnnnnnnnnnnnnngggggggggtgttagagtactgttagggtttcggggcttgtccctgtgtaattacttgcataccctcagtgtaatgagcttggcccatatagcactcccaactcagttagggttagggtttcattctccaacagttttgttcattatgagcacattttttgtcgacttgatttgttaatagtaagttattctgtgaaggtgctaacttttgatctgtttgggtaatatgaatgatttatagttgcatacctattataattgacgctatgtaatcttaggctgctctttatcaaactgactttcgaccagttccactggaggaattcataaaagttggtaatcaaatatttgataaagacatgaacgttgttcgtgtccttcccaaagtagctgaccatggtggcaaggatccagatcatattgttgaattgtgtaatgaggtaaatctgttatttacattgcaggtcttagtttttctctgttaaacactacaattttgaagcaaattgaatattgtacttgtatttgttccaggttgttcttcagggccattctgtgcttttgttttgctccagtcgtaaaggctgcgaatcaactgcaaggcatgttgccaagttcttgaaactaccctctgttggaacaactgatgttagttcggagttttcagatgctgcagctgctattgaggccttgaggaggtgccctgctggattggatccaatattgggagaaacccttccttttggtgttgcatatcatcatgctggtcttacggtatggaagctatcttctatcttcataagatacacaaaatatcaaatatatatatatatatatttatttatttgaaatttgcactgctaaatatgtgctaagtggtgagagtggtctcactaagccaccaggtcgcgggttcaaagcaaccccttcacatttgcgggggaagggttgccttggttttatcccttccctagaacttactcacatggcctccgtcactgggtctgccctttacactgctaaatttaataaagtgatgccatttttacctaaccacagctgggcaaagggtggtaggaactgatctgccattacctgttctgattgatccaatgagcgtcatcgccttctgttctgtggcaggtcgaggagagggagattgtggaatcatgctaccgtaaaggccttgtccgtgttctgactgccacttcaactttagctgctggtgttaacttgcctgctagacgggttatattcaggcagcccaagataggtcgtgattttattgatgggactcgctatagacagatggctggtcgtgctggtcgaactggaatagacacaaaaggagaaagtgtaagctacaatatctttgttccactttattctattagagaatggttctgacatttcactagttctgttttaattgtgtttttaactttagcctaccccaactgcttgggagaaaagggctttgttgttgttgtctaataatctgacatttgaaatgcatgcagatacttgtatgcaggcctgaagaggtcaagagagttacaggtattattagaagcaattgccctcccttggagtcctgcctctcagaagataaaaatggaatgactcatgcaattatggaggttgttgctggtgggattgttcaaactgcaaatgatattcatcgttatgtgcggtgtacgctgcttaattccacaagaccttttgatgatgtcgtgaagtcagctcaagactcccttcgttggttatgccataaaagctttcttgagtggaaccatgagaccaagatatactccgctactccccttggtagagctgcttttggaagttcactcaaccctgaggaatcattggtagcatacttgtcttttgctccttcattattttattgcattgagaaagggcctctagctgagttggttaggtggtctgagtagcactccttaggttctaggtttgactttccgtgggagcgaatatcagcctgtggttacctcccatttgtctgtcccacaccaaagcacaggtctaaggtcctgtctagatcgtagtcgtttctcaaatgggctacggtgccgctgtgtatgggtggggcaggggttcgggggttttctcgacctgcgtgagaaggtcttcttaatataatacccgagggctgtcttatcccccgcaggtcgagttttttttttattttattgcattgtttaatcttgcatttttctgtttctgcactaggttgttcttgatgatctttcgagggcaagagaaggctttgttctggcatctgatttacatttagtttacttggtcacacccataaatgtagaccttgaacctgattgggaattatattacgagaaattcatgcaactttcttctcttgagcaggtatgcaagtcttcttttgtcctattgcacttgaaagttcatttatcaaactgtaaatagaatatccagaaattcgagttctatctgtactcattagaaaatagttgaaagtgaattccgaaaacatgattttagttgctgttgaactaaatgtgtgaagcaaaagtgaattcagaaaatgcaaatcaaatttgttacggttataatagtcataatattagtgtaatcttctagtctagggtttccctcatgtttctcatgtactcttatagtgcttattcatccaattcagtgcttgttaatggaatgtgtgaagtctatttcggtatttttacataaccatgaatcagactaaaacatgcatatgtttattgaactccttcgcactgtacttggttgcagtttactacatatgttatttgacctggttcataagatttttttaggagttgtcagttcttattagttttttgtaattcccatgttttctttggcccaacaagaaacagaacaactgacatgataccatgttttctgcagaacattaatcttttatcagtggtattatcattagtgccaaaatgtttataactgtatgccatgtctaccctactaaggcctaagactgtgtccaacactgttttgcactgttcacagagtggagccaaatgtgttcgcttgactttaatccgtaccggcttctattgtttctacagtatttttgtctgtatagattgcagctacagcagtccaaacagttggctttaatctgcagtagctacagacccttttggacttgcgcactgctcatgcgaaaagtggatgcgttactgttcatgtcgggtcctgggtttgttaagacagatattagattagatcgggttgacttgttggctatttctttaactctagaaaatagttaaggatcaaatctacacatctctattgggattgtatctactttgaattaagtaagaaatagatagttcaacagttcctatctggctatctacctccttaacactggctttctcgcatggccaacatgaagtatgcctgtgacaccgtatctttctgccatattggttgagaaatcaaaccattacttaaattatcaacttcagttcagttcatagaacacataatttcactcatttttttaatttctgtttgttttgttggtacaatgcagtcagtaggcaatcgggttggagtaattgaacccttcttgatgcacatggctcatggggcgtcgataccttttcgtgcaaggcctcagagaaacaccgggttaagtaacaagtctgcacaagctgctggaaatactcttgttagtgagcacacaatcagagtgtctaagcgcttttatgtggctttaatgttatcgaggcttgctcaggtataatctaagaactacttagacattgcatgttagttctatgtcaatgcatagtgctcaagatcgctagaaagcctaagtcgtgaaatgtaaaaaatagttcaatagagattagataatgaaggttgaaatgttctctcattatatatggctaattaaaatattagctcatgtcttatatttttgtagaatacacaagagagctatgtatcatttcattgagaagggtataaataaataagttacaacacacccaccacactcacacatatacacatacaaacttgtactggaaacaattcacaacacacccaacatgccttttgcatcagaacaagacccttgggtgggcatttggggaactaaaaatttgtgggtactagaaattgctacccaatttcgagtttcgacctcgaaaaagcattagccaaaattttagatacttgataatttgagttccagttttacttggtgtacctgataattccagtagcattttaaagtaagaaacaaaagtccatcaaatcatttcatatcaattaacaagaaatcaattatcaagatagtacaaatctacattgagccataccaaataatagatttacactatactgaaccactccatatcttcatattagaaaatagaagaacaaaatttttgagatattttgcgtaattcgggtataaatttacccaaactacctgaatggaattcagttttctatagctactattacgaagatggtttccatggtgacctgctagatgggctatatgggcgactcagtttgtgggaatcttatccaaggtatcaaaggtgggacgacaaccactcgaccagccgtgtttccacctgtgaattccttcacgatatgcctgccatctatggctatggcctcgcgccacctcccttttatcaaaccacgcgagcaacgtccctcccatcgggttttcaatgtttatactcgtttgtcaaaaaggaaaatgctctcttgctcagtttcttggcaacatggactttcaagaaaattttcagacacctttttggctctttctatggaagccaccgaagaatacctcaagttctatgatacaattatttcagttcaaaacaacatgcaaggcaaggataaatggatctattcttggggaaacaacaatctacgttcaagcaagatttacatattaaacttacaatccatgtacccaccttctcctttcaagtggatctagaaatccaaagtgagtaaaaagatcaaggtgctcatttggctgaccttcagagacagaatcaactcaagaaattttcttcgaagaaagatgtgtacaattacaaatgatgattacaaccatgttctttgtggccttaattgtgaggaaaccacatatcatcttttatttgaatgtccattcagtacattgtgctggaatcatgttggtattcactgggatcaccctttggatttttttgaaatgaccatatctgcgagggatcaattcagtaaaaatttcttcatggaaattctggctgttacgacctgggagattttggaagcaaagaaatgctgctatcttcatagattcctttccatcttttacgtcttggaggttttgcttcaatgacacgttggggctacaaatgcatagaatgaactcgaatcttagcttgtcgatttccttgtggcttgcttctttattttctttacttctatctccatttgcttctattcttccttccctttactgtacatttccttttttatttaatatataccactgtatgggccttccctacagtttcatcggtcaaaaaatgtccctccaatgccctccctactgccacagtctaccatgccacaggttgttgcagcactaccatgcgctcccaccatatcttgcccaatttcatgtgtatttacaagaatttactggtataagttgctgagaaagtttgggttacacagtttgacccctgagccaggacatacatccttcctagactggtgggaggagtcttctgaagaagttcatgggatggttaagaaaggtctgaactcccttatcatcttgggggcctgaatgatttggaaccattgaaaccgatgtgtctttgatggactgacttctagtctttcctcgatccttgtgtagactgatgatgagagaagggcaactttggttaaagctgtgctcactgctattcccatttatcatctaattgctttgcaatgtccaaggtgggtaatcaaggcaatagacaagattcgcaggggttttctttggaaaggaagaactgacattagaggaggacattgtgtcgttgggtggtccaaggtctgtcgtcccctctctcttggtgggttgggaattcacaatttggaagtnnnnnnnnnnnnnnnnnnnnnnnnnnnnnnnnnnnnnnnnnnnnnnnnnnnnnnnnnnnnnnnnnnnnnnnnnnnnnnnnnnnnnnnnnnnnnnnnnnnnggcccccccgcgctgcaagtatttcatttggcttgcatctctcaaccgatgttggacggctgatcgactggcacgtcatggaatggatcatccagatagttgtcccttgtgtgatcagcaggatgagtcagtgcatcacttgctggtggattgtgtttttacgagggaagtttggtttacaacactaagcaggctaggtttgcaacatcttgctcccacgtctgatgctacaaggtttcaagattggtggagtgaggcagaaagacaagtgtctaagcataagaaaaaaggtttcaactctattgtaattttagtagcttggcagatttggaagcatagaaatgcgtgtgtgtttgacaatgcttccccaaacattcacgcaattttgctgtccatccatgatgaggctttattatggggtcttggaggggctgctgctcttaggcaggtttggttgtagtttgatttttggttttttaattttcgggggtgctttcttggcacctttgtactgggtcttttctagacccttttttcttatcttcttaatatatattgatgcgtggttctcccacgtgttcgagaaaaaaagatgatgagagaagaatatgggaattagctggggccaggggtctttccttcttggcaacacctcttcttgaggtctaacccccctggctctttagtgggtagtgtgagtgtttttacatggatcctttcatttatgcgtgctgttggcctctatagggaggttttttcttgtaacccaggtcttctttagaccttcctttccctaatatatttaaagcttagttcccctgcgcttcctagaaaaaaatatctcgcccaattctcatgcaccaaattcagttcccaacatcgtcttggctgattctaggatggtttgacacattatcgctggccttggtggactacattgccgctgcccatgcagtgtcgtgcttccacaagcttgaatttcattcatacgaatgattgacgtagtgtgagtagttcttccatggctaacacaccttggaggtcgacaagtcgtatcacctattcgaacatgacacgagcacactatcgtggatcgaattcaaggacctttgcaacttgtgtttttggcccccaattcgcaacaaccgcgttgacacattggctcgtcttcgattcttgaccaagatgcaagaataccaagatcatgtcatgccaacaagcgaagttgttcgctatgggatttccaaaatatatcaatcttgacatgaaattgtgggagccccaaaatcttcatataaaatcttcatataatcctatcatgatggcacacactgaacaaccatgaccctagtgtgcgttgtggcacactgaccaaccatgaccctaatgcacaatcagcactgatgctgaactccaacgaggaccactccaatgacaagcacatggacgagcaacaactctagcgttgcacctactctgtctattaacatcaatcgagttgtctaatcatcggaaacaagggttttgtcataattgtgatgagcaatacattcatggccatcactacaagtgactcttctacactgacgttgtcaactatcaggattatattaggtggctatgttgttgtcctcagtgtggccttcctgcgcatacttgcctcgtgttctagcggtaccagtgccacgtcttatgaaggggcattaggtctacatgcgcaagaagtctagctatggttaacgactccgtcaacaccacaaactctaggttcatggaccatctcctcaacatataagttgatctttttgctgaaacaagaggactttatcggcttggcgctgccaccactgcatgcacctgctactaaggacaactctagtagatgtcaatccatacatatacccacaactctagaagaataagctccatgctcgagaacaacatccaactgagtacattagcattgttgggccttgatgcttctcatcaagaaggttggcaactcatggaggttctgctttgactacagtgtgttgaattggaagacagtgaaggataaattttcgatcctgatggtcagtgagctactcgatgagccacccaaaattctttatctagctcgacctttggtcaggctaccaccaagtccacatctaccctgacaatgcgaaatgatgtttcttacacatcatggccacttcaagtttcttgtgataccgatgagcatcgccatcgcactagccacattcaacaacctcatgagcgacatgcttcgatagttgctttgctggctcgtccttgtattttttgatgtcatcctgttatagaacatttcttggatggagcatttgcaacatgtcaaggtggtgtttgatgtgctatgtgcgaacaagttgttcatcaagtggtccaaatgccacttcggtgtgttgttcgtctcctaccttgaccatgtgatctcggtgtatggcgtggctgtggatggcgaaaaggtggaagttgtggcatcgtggccacaactgtgatccactagggaactctgttgattccaagtatcgcgggtattacaagaagtttaacaaggactttggggtcatcgtagcacctctcatgaagctcttgaatgagggtttaggtggtgccaagaagcagaagatgccatgcaggggactcaatgggctgctatcaaccgcacctatactgcagttgttggcatttgacaagctgttcacggtagactgtgatgcgtcgagttgagtgcactaaggcgccagagcattgtcattctttagtgtaggtccttcgtagctcgacatctcaaggtggtagcctacgtgtgtgatacgattggcatggtgtaggcggtacaacgttggaggcatgggcttggtgcaggcggtacaacattggagtccctacttatggggttgaagccgatatggcattggagtccctagttacggggcaccattttctgcgcttaaagttcctgctcgatcaaatacttatcaaccccaacatcaatggatcaacatgctctttgactttgatttggttgaagtgtataagtggattgcctagcttctcccatcagcttaagcttttgggttgaactggttagtgtgtccactctaacatggtatcaaagccagaggtctcgagttcgaatcctgacagagacttaatttgtgcctccacccatttatttccacgtttgcgcgtttctctttgtctgcgtttgcgcctttctctctggctacacgtgagtggggggtggtgaagtgtataagtggattgattaccttctcccattagcctaagcttttgggttgaactggttagtgcgtccactctaacatggtaacagaaccagaggtctcgagtttgaatcctggcagaggctttatttgtgtctctacccatttatttctgcgtttgctccttttccatcagcttaagttttttgcgtccactctaacatatttcatagtgaagttttgggcaagcggaacacacttgctgacaccttgtccaatctcctattgtgacattgagactgtaggcactctcaagaccctcgttctagctctataacgacatttgccacgaggtccagacacagtgagttgggcgatccttggcggatacacgatgtcctcatcctccacgacaactagatcttcctagacacatcctctagcttgttgttcacttctttggagatcgcacaagacaagtgtccataaaaacgctcaagtgcctccaagtggacttttatattgctcgaggccgcaaggtggtctgttattttgtgaaagccttttcacatgctagaggaacaaaatagaaactcttcacctgtcgggactgctctagccattgctggtgatgttgaaggtttggaagggtgactcccttgacttcatggaaggccttccaagggtgcacgagaagtgtgatcctcacagtcaccgaccatttttctaagtatgcacatttcattgccctcgttcaccacctatagattgtggcatcggttgtgaaggcgtcattcgatggtttttatggcttttctagcatccattgtaagcgaccaggaccccgtgaaaggtaacttttggctggacctcttcaagatggctggtgtgagcttcgtataagcatagctttccatctacaaactttttttttcctcgaacagcgcaggagaactgcgcgtcatttcatttaaggaagaaagtaagtacaaaggtcaagagtgacccgaaacacaaacaccaacacacacacgccatccctcaaatacaaccgtcgcgccacatcaatgaagaaggcgaccacaacctacagggctaaaaaagcaccagtaggcaccgacccaaaaacaagttcctggagtttggaagctccagccaaacaccacagccccccttccacattaacagcttttagcacttcctcaacacatggcctagaattgtcaaagacacacctgctgcggtgcttccaaatctcccaagccactaacataattagtgaattgaggcctctacgaagccccttaggaacagcagcaacagttctcttccaccaacctgggaaccgagacactagaggtggtgaatagaactattgcaatgtacttgcagtgcatcacgggagataggtcgtgcacatggctggaatgactgccatgggaagagtattgatacaatacatccttccaaatcacgctcgaagataggcgccactgcccttggtcccattcacagtgcgcaccacgcgaactcaagcagtgcagatggcgctttaggagcgtgaccggtttttggcagagctctatgaatgactggttcaagcccaatatcacgggaaacgctaatacaataagcaccatcgcaaactagagttcgagatcggctcttgggtgtggccatgaacaggttgctgaaaagtgtctctgataccaaagatgatttgtctggattgttggctttattgatacaatgacaaggaaatcatcctgaccgccctccctaggaggctctggtcataataactcacttcttgctaaacccgtaatcaacattaggtttacagataaataggcttagaggttagctgttagagaaaggtatatgctgttgcaaaagatgatgtcttgcattgagctcttagatgatttatacagagtacatggcgtaggaggtaagacaacccatggatacatatggcagtctatgaagtataatatctagactatcaaatatactctaacacatgtggcagtctactagacaatatctagactaccaaatatactctaacactaaccactcccctagaatttctcttttttcctattgttcctcctagacttccaactaagctccatgcagacaactacggaaaaactcaacaaacttgacaactaattaggcgtggctgttagccacatggtgttgtggacgctggcttgttcttcttgtggcgagtatagacttgctgataagcgtccacaacaggttgttcgtgactgctggtgtgttaactctactatgaaaatatctatgtgcagtatgaagaagctaagctatttggttcagaactgaacctgtattcagtcttagcaactctactcatcaccctcctctagttgcaacccaatagagtatttctgatatgtctttcatatcatatgcattttgtacaagcagattagattatgtccaagttgtgtattgtaatgattttaatgtaagtttgtcttgtaatatagtctttaggaattgttccttgtggtattatttattatctgtttcttcttgtcttttgtttgtttatcttttattccaagttggggtgttcccatcttgtttccttgaaaagattgtactgttctcatgtaatgcttctttcaggagattcctattgctgatgtttgtgagacatttaaggtcgccagaggtatgattcaggcactgcaggaaaatgctggcaggtttgcttcaatggtttctgcattttgtcaaaggcttggttggaatgatttagaaggccttgtttcgaaattccaaaatcgtgtctcttttggagttagggcagagattgcagaactgacatcaattccatttgtcaaggtgtgctttaattaccatgcatatatgaattatctaagtgtctctggatcttatttcagtatggtcatgtaaaatatgaaatagggttcacgtgcaagggctttgtacaagtctggtctgcgtactcctgttgccattgctgaagcatctattcctgaaattgcaaaagctctttttgaatcttctgcttggtctgggcaaggtactctttcacgtattcatggtctgattccttactactcttttttatagtacttgttttgatgaggatataaatactatagctgaaatcctgtcctgtacagtcaaggattttccttgtacttatcttgggctacctctcacaattggcaaacccacaaaggaggtcttgctgccataattgaaaaggtggcagaatttttgctgggatggaaggcttctttaatgaactgtgcaggcagattggtaatggttcgagtagtgttaactgctgctcctatttaccttttgattgccatggatctaccaaagtgggttctaaaagccatcgacaaaaggaggggtctcctctggaagggccaggaacaagctaagggaggtcactgtttggtctcttgggaaagggtgcaacagcctctggaatatggtggtcttggaattcataatctggatctgcttggctgcgcgttgcagattcgctggttgtgggctgagaaaactgatcctagtaggctttgggcaggcctccccgctcaagtccctcgcaatgcttaggccctcttcaacattgcagtggacatcattgttgggaacggtgagcaaacactcttctggacagacagatggctggatggccataccatatctgaagtggcacccagcttatttagtgctgtctcgaagcggacagccaagaggaggacggtagcccaagctctccaaaaccaaaggtgggtggatgacatcaaaggagcactcacagtccaggttatattcgagtatctaaagattgtcgcatggtggatggtctgtttttgcagcaagatgtgccggaccaattttgtgtggaaattaacacaatccgacatttacacagcatatagtgcttatttcattggcaccatcaaatttgggccatggagaagaatatggaacagttgggcacctcctcgctgtaagtttttcatttggctggtgttccataaccggtgttggacggttgatcgccttgctaagagaggcttgccccaccctgatgcgtgccagctctgtgatcaagatgatgaagacattcaccatctcttggcctgctgtgtttttgctagacaagtatgagcaagcatctttcttcagtcgggccatactgccttggcgccatatgcttcaacaatctgtttttcaaaatggtggtggacagtaatctcaactgttcctaagaaaatgcggaagggtctaaattctttgatcattttggtcgcttgggaactgtggaatcattgtaatgcttgcttgtttgagcaacataggcccaatgttcaggaagttcttagggctgttagggatgaaggtagtctctagtgcagcgctggagcaaaaaagctccaagagctaatggtcacggtgttcagtctgggggattaggagcttgttgaggttcctttccctggccgcctttcttttttctcttctgtttgggttttagcgtctccagggtgggaggcgtgatgtacagtgggtgtgggtgaggtgttcttgtatttatttttggcattcctgcctttcttctaccttaatgaaatgttgcgcagctctcttgcgttgttcgagaaaagaaaagatgcacaaattggtttctcagttacttctggatatattcagtaataagcttgcagatactttattgtttgttttaagcctactctaatgtcaatctgttgaattgactaggtgattctggtttacgacgaatgcaatttggtgtagcaaaaaaaataaaaaatggagcccgcaaaattgtcctggaggaggcagaagccgccagagtagcagcattctcagctttcaagtcacttggtgtggaagttccccagttcactgcacctccactcgcagctattgaggaatatccaactcacgataccatagaccaagctaagttaaataagctagcttctggtacccattctagagatgataaaaatatgaatacttgctctgattatgctactccaagggcttctacatacagtctaagaaaggacacaagtcctgctccttccattcaaatgaaagagaatgcaggactatctaaaaatgtgcaaatcactagacagggagcatcatcatctttgtcaacagaaattgctgatggatctagtagagatgtggctgaaaaaggtcctgtccatgcatataacttcccagggggatttgattgttttcttgatcaatggtccacagctagtaattttttctttgatgttcattttatcaagagatcgatgaaaccatctttgaacctttttgaagtttttgggttggctgtctgttgggaaaaatctcccatatactactgcaacttcccaaaagatctagtcactactggcaacaataacatcaaggaaatgtggggtaattttcagagaagatgggaaaaaatagcggacattatgaaacaaaagagtgtccaaaaaatgacatggaatttaaagatccagatccaggcacttaaatcaccttatatttcttgccaacggcttgaaaggtttcatcttgaccataaaatgctggacaaagttgaagtgcttaacaactcatatatgttgttatcaccagtctctgtctacaatggattggatatatgtctgctggcgtgggttctatggccagatgaggaaagcagagcggttccaaatcttgagaaggtatttgatatatgtcgtgttctgcaatatctttagcttttcgttgctgatgcattgtcacttcatgtacattttttatattcgtttttttctgaactttgcaaaagcaatatgagtaggaattttagttgataagagcctcaagaaccgtgtgttggatatgaaaatgcaaggaaataggattattcatatagggcatgatgagaatgctaagagactttttaggaagacttagatgtcatgtttacaactatacctatcagtaagaaacttttcataggagatctcaatgggcatgtaagtacaacaagtgtaggttttgaggtgtttcatagaggcttccccaagcttcacgtctcagacaatgtttcttgaccaagtgggtttggctatgacatgaagctaagaaacattgtctggtcatgtccactttggagcgtaccgctcgtttacgctctcgaatctgcttccttaaagatggtgataccaattccatagctatgttttctggtcgcccgaccagctagtcgaactgggggatcgaccagcgactaatctcgattagtcgtcgactaggtccgactaatcgagctctggtcgacctggtcgtcctgttcatccaggagaccaggacctatgtatatactatataatatatactattatactatatagtaaataattatataactatatagtatatatgaacttcatatactatattatgaaggatagggtaaacatgacatgaattcagcaatactgaaaagtgaaaacagcatagaaacacttctagttattaatactacaagtcccagataccagtaccacacaacacacattaatactacaagtccaaaaaaaaatctaggtcctaaacctagtcgcccagaaccggctaatcgagcgactaatcggccctaatcgtcgactagtcggacgaccagggcgaccaggtactctagtcgagtcgactgcctaatcgagctctgctaaccgactagcccgactaatcgcgactaatcgcgattagtcggacgacttgaaaacacagttccataggcatgccagtttccggaaacaaaagaactttattgggaagttggtggttgatgatcagattttcacctcgcaagatgagaaacagaagcttgatggtatcttaattgcggatgcaagaggagacttatctttcagttatatcttttggtcgaacaatgtgcttgacaagtggagtatagtggtactaatctacacgagtaagggaaatatttaaagttgtatcaattaccaagtaattaagttgatgaaccatactatgaagctatgtgagagagttatcgagcattgtttgagaggaataatgaggatctctatgaaccaatttggtttcatgtccgaaaggtcaaccatggaagttattttcttaataagacaagggatgaagcagacagggagcagaaggacctacacatggttttgttgacttggagaagacttatgacaatatactaagaaatgtcatgtgttggtttttggacaaacataaaatctcaaggaagtatgttgtagtcattaaagacatgtgttcgaacaagggatggagacacaaataacttttcgattagaatatgactacatcaagggctggctttgagcccttatctttttgccttggcgatggatgaggtcacaagagacatacaaggggataccccttggtgtatggtttttgcgcacaatgtaatgctagttgatgaaagccgagcaagagtaaatagaaaactagagttgtgatggaagactctagagtctaaaggtttagactcaatagaacttaaactagagtatatgagatatgacttcgacactactgcacatgactacatacggaaagagatcttagtttggaagtttaagtagtgcttaggaaggatatcttttagtatttagaatcaatgctatagaatgacagggtattgatgaaaatgttagccatagaatcaaagtagggtggatgaagtagtgtcaaccatatgatgttctatgtgacaagagtgtaccacagatgctaaaagacaagttttaccaaacgatgattatacctgctatgtagtatggtgtagaatgttggcctataaaaacacattttcaatagacaagaagggattgagttcgaatcatggaatggtgatacacatgataagctaggggtagcaccaattgaagaaaatcttgtctaacacctgttgagatggtttgtaccatggtttttaaagcggtaaggcgctccaaggcgttggaccaccgcctagacgcctaggcggcgcctaggcgacgcctaggcgaggtaggcgggcaaggcgcctaggcgtcagaccaccgcccggacgcctaggcgtcgcctaggcgacgcctaggcgacgccttaaaaacagtggtttgtacatgtccaacagagaactccattagcaccattgtgtagtgacgcgctaataatgggaagagagatggagaaaggctaaagttaatatggaaagaggcattaaaaggagtcaaagatttagtcttgaataagagtgcatggaaaatagctatccatgtgcctgaaacttgacttatggtttatgttgggtttcaacgctagcctatcctaacttgtttgggattaaaaggatttgttgtttcttgaatacgcaggaggtctgcgtatttttatattaagaagaaaaaaggggggggggaccccaaaacagaaacaacagttttacaaactcacaccaccattaacgcctaagacaactcctctaaaaggatttgttgttgtttgcaatagcaatacacagctgttaattttgatgctgacctatttctgataatatattacttttgcattttactttgtgataaacagtttgtcaagaggcgacttcatagtcaagaagccgctgctgcaaatcgcgatggaagatggagaaatcagatgcacaaagcagcacacaatggctgctgtagacgtgctgcacagacacgggctttgtatactgttctgaagaaattacttactcaaaatctttctgttttggttgaaacaatcgaggccccattggtacaacacctattcttacttaatactctctccagttataacaaaagtgtcattttgggttgcctgcagttaatttgtttatactttgatgctttggattgaatatctgaaaataacgcaactagattcttcctggaaagtagttcaaaatataacaactttgttatagtttcatacattttgtagcaatcgaatcatcctattagtacccatgttggtatccaaaattacacttgtgatcggaatacaatattgctgcttgtattatgcttggatatctcttatgcatttattttgacaggttaatgttcttgctgatatggagctttggggaattggcgctgacatggatgcttgtctccgtgcgaggcatattataacaaaaaagctgaaggaactagagaaagaagcttacagattggcaggcaagaatttctctctaaatgctactgctgatatcgcagacattctatatacacacctaaaattgccagttccaaaaggctgtgagaaagggaagctgcatcctagcactgacaagcagtctttggaccacctaaggtattttttcattttccttgttagttctgacatcaaacatgttatttctagttctttggaagtacttgtgtgccactttatgtccgtgcattatggatggaaaattttaaatgtgttagcatatctagtgtctagtcactgatggtctattggtagttttgtgtgagtaaaggtaaattattatgttgtcttgatcagagctagaaaagtgcttgtggaccaccggccacatgttattggcagttaatctctggacatgcttttagaatatcattgtgctaatatgcactctttttctgttttttttggagtcaattaacaggattaactcatttttcatccctaattaaatacacgcatgcatgttcaaataatatcttcaatttggaaaagcttatgccaaagagaagcacatgtatcactgctttactgtattttcagtatataggctgctgctgatgtccttattgtatgcactcggaagatcggtagcaaggcaacactacaacagccttgccaagctggtcttcctttcgtttgaaatctatggcactcttttgatttcacttggccccaaattttcctcgacataaaattgccgtggctttatagtttactataaaatccttatcaactggacataatgctctctttaggcttctattaattatcccagtaatgtaggagaatttaatttgaccattttgctaaaatatttttgaattcttctgtttcctcagggatcaacaccccattatcccattaattaaggaacacagaacattagcaaaactgttaaatggcacgttgtggtccatttgttcacgtgctcaattgtgcactcaatcacaaaggtacatcatacatggaaattggcttcagacgtcaactgccactggccgtttgtccatggaggagccaaatctgcaggtcctttagttgtaataaatgctttgcatgttttgtttggatttcagttattgagaaataacctactgacttaacctgttactatgtagtgtgttgagcatgtggtggaattcgatacagggaaaagcgataaagattactcaagcatgtcagttgatgatcatcataaaatcaatgcccgtgattttttcatacctaccaaggtttttctcatttcacttttatgtatttattaagttttccctttaattaggacagttgactattttcctgtaacaacgctttatttaatatcatgatttacttattttgtaggagaactggttattcataactgctgattactcacagattgagttgcgtttaatggctcacttttctaaagatcatatgttggttgaacttctaaagaaacctgatggtgacgtttttaccatgattgcttcaagatgggctgagaaagaagaggccttgatttcttccaaagagagagaaaacactaaaagattcatatatggcatcctttatggaatgggtgcaaactcccttgcagaacaacttcagtgcagcactgaggaagctgcacagaaaattcaaagctttaggagattttttcctggtgtttcctcatggttacatgaagttgtgttatcctgtcgccaaaaagggttagtctacttggtagcaatttctgtttagtctttctttttatataatattgctcctttgatttttgatgctaacattgaatgagctctgtgaaaaatatgttagtcttaacttttgtggtatttcatatctgaacttttgagatatttcatatttgagcatgtattatcatatctttcaatgttagtatgcgagctgcttctcataataatttaaggtgaatatgcttcatgataatttgattttatttgaatgttaagtttatacagtaaatgataaggattactgtcttttggtcatgttatttatataacgactacttaagatcagagctcctttatctgttgggttgacatatgcacttgtagcccatattgctcatgagattgtatatatattgtcgtatccactactagcggtcttacgaaaccccaaggttactaaagccatggattagagtttgggataactttcaaatgcactcatgattcaattttctttttacctggtttgtgccgatcagaattaatgtctgcgcccttcttcagtttgttgtggcctaacttgtgaaacccttgctatctcacaacttccatctgttagacaatttattttcttccctagttacgaggatttcttctctgattatgtgccagcagttgtttcctccgtacgtagctgtccttgattaggtgtggacaattggttccttcctccctggctgtttccttttagcgcccagatcatctccccgattattgtttccatgaaatcaggtggagcacgttctggtagaggcctattgttctcctgctatttagttgaatataagcaacatttcgcgctattatggcatcaagagattgttacgatcccgtgagaactcgcttttggtaatacttgcttgcccacgtcgcctccccgatgttgtgccgtcatgccacctagtgaccctctgcccgttttccggtgaccaacaacataccgaggatgcagccacataggagaaggcctgctagatccttatcgttgctgccgatgaggctgtcaaggccgtcactgccgcctaggatcatggccgcacaacccaggacgctctcgcgagggaacgctaggctgctaccggtctcaagcgtgctaaggccgctgctcgtgacgctgccttccctcctctcaacgacgaccctgatgatgacgccgacgctagtgaagacttcaattatgaggccgctaccgcctccaacctccacgtggaggccgtgggcgtacagaacctccatgcccttgtgcctgtggttctggacatcctctccacccactacagtcgctgcgggatctcgtcctcctcgccctcgagcggtatgccgtcgccgaccatgtcctcttcgacgccctatttgtgccatcctatcgacgcatggacatcgtcgtcttgtcatgggtgttgtgcacgctctccctgagtttgagttcgctcgcacccccggcggcacaacacaccacacctggatcgttgttgaggagcaattcctcggtaatcgtgaagctcgcgcccttcatcttgacgccaaattctatgtctttatgcatggtgacctctctgtcggtgactactgccacaagataaatgggatggctgacgctctcggtgatctcggagtggttgttcgtggccgcatcctcattctcaacgtgctacacagcttgaacgagaaattaaaccacatgaaggtccactttcatgcactccaagctgctaccttccttcgtctgcaacgacctcatcctcgaggagattgactacaacgcatcaacaccgccaccagcagccgcccttgttgctgtgcatggcctttcggtagctctgcttcccctagcgtcccctcttctgggggcttagctgcgcccctgtcccacccacggcgccctccggtagcatctccactggtgccgacagctattagtagctaccgtcgtcgttgcgacaacggtggcgttgaaggcaaggccatggttccctagcctttgatctacaactcgtggaccgagttagtcaccatgtggcctggccccacatgtgggccacaagaccgtggtggccaaacgccgcgcgcgcccatgcctcaggccacgcaacaacagttgacaacaacatgactagttcgtggtcatgtcgtttggcttgaggaatgcgttaacatcattctagtcccccttgagaattgaatagcactcctagctgacaccatggactcatcgcactcttcatgggttgcttggcctcacgggcttctaccgcttcttcatcaacaactacgacatcatcaccacaccatgaacatccctcaagcgtgttgccttccagtgtgctgatgtggcgactacatcctttgaggccttcaaggcggccctcacctatggactggtgctgcagttgttgagcatcacggcttcgtccatcatcgattgcgattcttcgggcattggttttggcgtgctcttgcccgatcgccttgtttagtctgtggatggagccccagcctaccaaacttgccacctaagagcgcgagctcattggccttgtgaaggctgtgcggcactagaggtcgtatgtctgggaccggccagtggagatagaagattgggtccctaatgatttctcccctactagaatactgcaacagaacctttgaatcttttagtcctgaacaagttgtgcaggctagtttcgaaatgcaacaagggaccacaatatcgatgatacagctaggcatacatcaaagaagtttctaattcgttatcactcctcagatttgttgagactttattaggccggcgacgtgttcttacaaaaataacggctggcaatagcaaagagaaagctaaagcacagaggcaagcagtaaattctatttgccaggtaatatagcattctcacatagttttagatggttgattttattgattatatgattaatatgcatgtgtttccagggttctgctgctgatattattaaggtggctatggttagagttcattcaataattactaacagaactagtgcaactgattccacagatgaagttacaaggaaattttcagaacttggtggccagtgtcaccttattttgcaggtgttttaagacttgcattgcatgatacttattttcttttgacttttgctcagtttggctctaaatatggatgaatgcaactatatatttttcatttgtaggtgcatgatgagttggtattagaagttgatccgtgcatggtagcacaggctggaaggttgttacagatatgtatggaagaagcagcttcactattgggtatcagttttaatctaaacttcgatagttatcttatgttcagtctttgggagcatcttgaaaaggtctttaaaatttacctgctaaactaatagttatgccaagtgaacaaaatgaataggaagttctatttctgccgttctccaatagttaggttcttaaaactaacaacctgggcaggagggtatggggggagcacgcaaaaactgcggaggaggaggcacaaatagtagatatgacnnnnnnnnnnnnnnnnnnnnnnnnnnnnnnnnnnnnnnnnnnnnnnnnnnnnnnnnnnnnnnnnnnnnnnnnnnnnnnnnnnnnnnnnnnnnnnnnnnnnnnnnnnnnnnnnnnnnnnnnnnnnnnnnnnnnnnnnnnnnnnnnnnnnnnnnnnnnnnnnnnnnnnnnnnnnnnnnnnnnnnnnnnnnnnnnnnnnnnnnnnnnnnnnnnnnnnnnnnnnnnnnnnnnnnnnnnnnnnnnnnnnnnnnnnnnnnnnnnnnnnnnnnnnnnnnnnnnnnnnnnnnnnnnnnnnnnnnnnnnnnnnnnnnnnnnnnnnnnnnnnnnnnnnnnnnnnnnnnnnnnnnnnnnnnnnnnnnnnnnnnnnnnnnnnnnnnnnnnnnnnnnnnnnnnnnnnnnnnnnnnnnnnnnnnnnnnnnnnnnnnnnnnnnnnnnnnnnnnnnnnnnnnncccccccccccccccaaaaaaaaaccaaaaaaagggagctgttctaagaagcccatggagatgctctaaccaaggtaaaactgaattggtgtttgcttttatttcagtacctttgcgcacaaagataaaggtgggaaaaacttggggttcactagaaccattctatcctgagccttgttgatgcaaatggttaatgtcagttggatgccaatgtttcacgacatgcaaggtcctggaagaaggctgaacaatttccaatatgccccacagggaccttggtaaatcctactcttttttatagaagattcaccccctgcagagttaatctcatgaggcctgctatttgccactatcgtttcttgttctgcattgtccatgtatttaactgatgcataccttgaaccatatatgaccatatatccgtgtgtggctttgctaatcttgtattttgaatttagtttacattttcatcttcacggtctctttgaaacttcaaatgaatcaggtgattctgtctggtgttcttcggtagaaccttcattgctatgtctacagtcttctgtcattgctgaccgtatgtgaaatcaacgcaacagcgaccagctccattactgaggatttgctatggactggtgattatcattatgattccatgtggcatgcaagaagcatatatatatatatcaccaatagatgctgttaaagggtttaaggtgtatttgaaaggtcttcctagttatactgcgaatcttttagataaacccttaagaaattggagggcctagtatatggtgatttttcttttgctaggtccagcgctaaaaaaccgattatggggtttattcaaagatgaaatttcatcctgtaactacaggttcaaggtgtatttggtttgatggatatcactatggacaagcgatggttggtttttgtacaagttggatgttgataaaaatgttggtatccatgccacacaaaaaaagcctaaccagcacccatattttgtaatccttgtcaagtatgttatatggtttacttgatagctctagcgaggctatccagtacctcaccttcaccctcatatttgtaatccttgtccacataattattagtatgttatatggttatttagtaattacgatggaaatatta

SEQ ID NO: 35 - DNA, 149 bp, Artificial Sequence
  marker ma61227s08
cctttgaggggtgactgtgattacagcgagcagtgccagatgaagcagaagcggagtgcgtccyagtcattcttggttccttgtgacaacgactatgtcaagaagcagcgagttgcccattgtggtggctttgaagctctaaaggttgg

SEQ ID NO: 36 - DNA, 72885 bp, Artificial Sequence
  genomic DNA of mutant pol theta (c->t at position 699)
  misc_feature (5583)..(5733): n is a, c, g, or t
  misc_feature (31155)..(31650): n is a, c, g, or t
  misc_feature (44470)..(44479): n is a, c, g, or t
  misc_feature (45143)..(45152): n is a, c, g, or t
  misc_feature (46993)..(47109): n is a, c, g, or t
  misc_feature (53299)..(53398): n is a, c, g, or t
  misc_feature (71287)..(71733): n is a, c, g, or t
gcccagcaattcaaaagaaaccgaacacccttccggaaattccctctggcaatggcgtcgggctcgtctcgcccccaaatcgaccaggtaaaaccctaacctagttcctcgcctattcacttcgtcgcctccaagcgctaattcttcctgcgttccggctccatctcagttcttcccggccaagaagcggaggccctcgtcgcggaagggcgagtcgccgcgacccgggacgcagcatgagagccccggcggcgccaaggggtccctggaagggtacctcgtccgttcgccttgcaaccgtgccgtggcagcggcatcggtggtccccgtgggctcgcccaggggcggggacccgggcgccaggcgtagcctctcggccgcaatggatgtcgacgtcggttcctcggcttcggtggctgcggcggcaggtgacggggcagactttgatctcaggaggagcacggcggatttcttgtcccattcctgcaggtgagcgcgcacagtgtgaaacataaggggagttatagtattggttccaataactgttattttgcaagttacgggtctaattttgttgttccagtgctatcctgcctttgaggggtgactgtgattacagcgagcagtgccagatgaagcagaagcggagtgcgtcccagtcattcttggttccttgtgacaacgactatgtcaagaagtagcgagttgcccattgtggtggctttgaagctctaaaggttggatcaagatacactatccatccatctttagcatcgtcatatgataagtgatttcatgagtttcaactcttagtttggttctttgcaggagttagatgataatgtagcttccatgaagcaatgcatcaatcaccatggtggctcagaggctgtggaggtttagttatgcctgaacaagtcaaacctggaaccgtttctttgttttcctcttttccttttgaacttctcattatttccttttcatcaggaatctgttgagggggaacatgtgagttgtgttgggttttcggccttgcaaagatgtagctttaccccaagtactgcacagataaaagttgggttttctctagcacctgtggaaaccctaaagtctgtatcgaggaattcccttacttcacctggtgaggagttctggaatgcagcaattgaactcgctgatgggatatctgcccaggctgataaggtccgtggaaggccagaatttgatgcagcagaagacaagtcatcttgtgcagtagcagcattctttaagactcttcctagatcaggaagggatgagcttgactgtcaaaacacagtaggcagcaatgatacacatcatatagagaaattgtcaaataaagttgaatcactggcagtaaactgtcagcatataattagctcacctttgcctgtgaagcagctagatttctttcatgaggatgatattaaagtttcaggttcaaaatttgaaacaaaaggcagctatgaaacttgtaatgcacaagcagaccgtgttccactgaaaggcagtggccgcctagaaaaggaaaatctcatggaccctgtggatgtgatgaagagaagtgctattaatttgcacactgattctgcagccatgagatgtcagggtgttttcaagtcaacaactgaagggaaggttcatccaactcaagaggctggaagagattctaatcttattaggagagatctcaatcagccaacccacaatgaaaataaatcacttgctgcatattcaaataatcgcaagacttggatagattccaagagtaaagttgcttctcaggaagtggaagctagcacacctactagctccattcctctaaaggatcactcaaagatatcaagttggcttcctcctgacctttgtgctatatacatgaaaaaaggcatttcagagctgtacccttggcaggttaaggttcttttctctaattatctatttaatgaatctctggcagctagccttctttcgtctggccatttttgcctatgtatttttttctccagccatgcaaactaccactgccctctctactagtaggattaccaattatttttgctcgtaagctaagcttctttagtatttgtatcgtaataagtatgtcttgaaaactagtacttagtatatcaagtgctgagatggtttgtacatgtccaatagagaccttttagaggcaccagtgcatattagtattataaaacattaaaacgtgatagtaatgggaagaggtagggaaaggccaaacttgatatggaaagatgcaataaaaggagacttaaaatgatgaaatatatctaaagatttagtcttcaatatgattatgagtgcatggaaaacaactattcacgtgcctaaccttgatttgtggcttgtgttgggtttcaactctagtctacactcacttgcttggtactaaaaggctttgttgttattgttgattcatataaaatgctaagtcttctcttgtattgctgtcatcacattcttttcacgtttttaatgcgtttttgcttcatttttctcgaatattgtaatgctctcctagatctgtctgaaggcatgtttggtttgtgcccccactatgctaaaccaaatttggcaatagaagaaaccatgacatggccttttgtaacaccccgtccaatccctggaccggcggtacttactcctggtagctctctagaatcatatattgtccccacagaccaacacaagtcttttatgcgcactttgtcctcactcatgcgcacccgagaaaacttcccagtcggtcacccatcccaaattgctccaagccaagcacgcttaacttggaggttcttttgagataggcttcctaaaaagaagatgcaccttgttgatatggttactctattaattctattaagccttgggccaggatatcccatcccaggggccaggatatcacaattcaccccccttagaagaccgatgtcctcgtcggtcaaccccaatccaggaacctcccctcttagccacgtctgtgtgtctagtgtcgtcatatgccatgccatgtgaccactctgggcccacatgcgccatgcgccatatacccaaaccacctagcccacacacgcccgtgaaacatcgagggtcggctctgataccacttgtaacaccccgtccaatccttagaccggcggtacttactcctggtagctctctagaatcatatattgtccccacagaccaacacaagtcttttatgcgcactttgtcctcactcatgcgcacccgagaaaacttcccagtcggtcacccatcccaaattgctccaagccaaacacgcttaacttggaggttctttcgagatagacttcctaaaaagaagatacaccttgttgatatggttactctattaattctattaagccttgggccaggatatcccatcccaggggccaggatatcacacctttaggcaggtacaagatttgaattggattattggagccaaataaatttacataaatatctacctaactaaaaggaacaatgtttcttgttgccccttccacccaatgataggtggacccaaggtaatcctgcgtctcttatgtcaggtcagcactctctcgctaagagccatttgttcatgattgaatagccaagtgagatggccaccatcctcgaggtcatgttttcggacctaggatgtcaggccgaatgtgttctggttcttggagttgtattttgtttcttttaatataagccgttcggttgcataggccaaaagagcagtttgaggccaaatgaaattttagcggcgagagctgtctcactgagttgtgagtttgaagcagtctttccgcatttgcgcggggggggggtgatggaataagtcttgagcatctagaggacagcctgcttttgactgtcctctgtagtcctttagcatctagaggacaacagtcgctttttgactgtcctctgtagtctctttagcatctagaggacaacaatcgcttttgactgtcctctgtagtcgctttagcatctagaggacagcagtcgctttttgactgtcctctgtagtctctttagcatctagaggacaatcctgttgtgtagtgtgtgtgagaaggtgtggtagtgcagcccctagggctataaatatgtgtccccaacctctctaagggtatgacattgtgtagtgtttgaggaaataaacagaaaattgccccaactcatagtgtcatcctcttgatgagagttagagtccctctacttacaattggtatcagagccaaactatcctgcagcctaaacatatcgtgctcatctccttctcgcgtctctccccacactcagtcggcagcaagagctccaactgttccttcctcccctgctcagacgagcagcctttcgtctgagacagcctcttccacacgcagcaacccctcactagcccaccatgtccctacgctcggccacttcgagtgcgcggcgccagcaggaggccgaggtcgccgcggcacaagaacgcgagcgagcagcagcagcggctgcagcgacagcggcgagggcagcacggttggcggcggcggaactggcagcggcgagagcggaagtagaagcagcggaggcggcggatgctgcacgtgcggcggcaacagagctcgaggttctgcgcggcagtagagctggcagctctgcttctgtcgacgacaacaccgacgaagagctcaggctggcgagggaagcagcgcgagagcaggcggcatagtgggcagccgcgcatccccatgggggcgcgcgtggcggcagcccggatacgcgctgacggcgctctaggcggaggcgcacgcggcggcagcccagacgggcgtagacgcgccggcggtgctcccggcggcggcgaccgagtcgacggagatcgcggcctctacaggcggcgcggttctccctccccggatcggtaccatggtcgccgcatggcccaggccattgtcagggacatcggtcccggcggtggggggcctaccctcaccaagaccaactacgtcgagtgggccgcggtgatgagggtacggctccaggttcgccacatgtgggaagcagttcgttacgacgacgtcgactaccacgaggatcggcgggcgctggatgctctcattgctgtagtcccgcccgagatgcagttttcgctttcccagaagcggactgccaaggaggcctgggacgccatcgctgcgacccgcatcggcagcgatcgtgcccgcaagaccacactgcaggcacttcgcaaggagtgggagaacctggccttcaagccaggtgaggatgttgatgactttgctctccgcctcaacactctgttgcagaagatggtgcagttcggcgacgacacctacgatgaggagagagctgttgagaagctcttccgttgcatccccgagaagtacaggcagattgctcgctcgatcgagtctctgctagacctctccacgatgacgatcgaagaggcgattggtcgcctcaaggtggtggatggcgacgaaccacaggctctctctgggcctatcactatcggcgggnnnnnnnnnnnnnnnnnnnnnnnnnnnnnnnnnnnnnnnnnnnnnnnnnnnnnnnnnnnnnnnnnnnnnnnnnnnnnnnnnnnnnnnnnnnnnnnnnnnnnnnnnnnnnnnnnnnnnnnnnnnnnnnnnnnnnnnnnnnnnnnnnnnnnnncagggtgacaagaagaagggggagtcctcctcctcgacacgaggccgcaaacgcggcaagccgcgcaagccgcgtggaggcgcccaggccggggcgcgaggacatgctgagggtggtgcacgtggaggtgcccaaggcggcgccgtcggcaacaagaagccggcacgcgacgacggctgccacaactgcggcaagcttggccactgggccagggattgtcggcagccacgacgtggccaggccaacgtcgcacaagcagaggcggaggaggaggccctgctcctggcacatgcaagcatcgagccatctccagcggcaccggccgcagcggcactcctccaccttgatgagtcgaaagcacgcgctttcctcggcgacggctccaacaaggacatgatcgaaggatggtgcctcgacaccggcgccactcatcacatgaccggccgacgggagttcttcaccgagcttgactctagcgtccgaggctccgtcaagtttggggacgcctccggtgtagagatcaagggcgccggctcagtcgtcttcaccgccacgtctggtgagcacaggctgctcaccggagtctactacatccccgcgttgagaaactctatcatcagtttgggacagctggatgagaacggttcgcgcgtggaggtcgagcacggagtcatgaggatctgggatccctctcgtcgccttcttgccaaggtacgcaggagtgcaaatcggctttacatcctcaatgtgaaggtggcacaaccttgctgccttgctgctcgtcgagacgacggggcatggcagtggcacgagcgcttcgggcaccttaacttcgaagccttgaagcggctcagcgccaaggagatggtacgaggcctgccgtgccttgaccatgtggagcaattctgcgatgtctgcgtgttgacaaagtagagactgctccccttcccccagcagtcgagcttccgagccaaggagaggctcgagctcgtgcatggggacttgtgtggcccggtgacaccagccacaccaggaggacgacgctacttcttgctgctcgtcgacgatctctcccgctacatgtgggtgatgatccttggcagaaagggagaggctgcgaacgccatcaggcgtgtgcaggtcgctgcggaggcggagtgcggccgcaagctgtgatggaataagtcttgagcatctagaggacagcctgcttttgactgtcctctgtagtcctttagcatctagaggacagcttgactgtcctctgtagtctctttagcatctagaggacagcagtcgctttttgactgtcctctgtagtcgctttagcatctagaggacagcagtcgcttttgactgtcctctgtagtctctttagcatctagaggacaatcctgttgtatagtgtgtgtgagaaggtgtggtagtgcagcccctagggctataaatatgtgtccccaacccctctaagggtatggcattgtgtagtgtttgaggaaataaacagaaaattgccccaactcatagtgtcatcctcttgatgagagttagagtccctctacttacaattggtatcagagccaaactatcctgcagcctaaacatctcgtgttcatctccttcccgcgcctctccccacactcagtcggcagcaagagctccaactgttcctccctcccctgctcagacgagcagcctttcgtctgagacagcctcttccacacgcagcgacccctcactagcccgccatgtccctacgctcggccacttcgagtgcgcggcgccagcaggaggccgaggtcgccgcggcacaagaacgcgagcgagcagcagcagcggctgcagcgacagcgacgagggcagcacggttggcggcggcggaactggcagcggcgagagcggaagtagaagcagcggaggcggcggatgctgcacgtgcggcggcaacagagctcgaggttctgcgcggcagtagagctggcagctctgcttctgtcgacgacaacaccgacgacgagctcaggctggcgagggaagcagcgcgagagcaggcggcacagtgggcagccgcgcatccccatgggggcgcgcgtggcggcagcccggataggcgccgacacgctgacggcgctccaggcgggggcgcacgcggcggcagcccagacgggcgtagacgcgccgacggtgctcccggcggcggcgaccgagtcgacggagatcgcggcctctacaggcggcgcggttctccctccccggatcggtaccatggtcgtcgcatggcccaagccattgtcagggacatcggtcccgacggtgggtggcctaccctcaccaagaccaactacgtcgagtgggccgcggtgatgagggtacggctccaggttcgccacatgtgggaagcagttcgttacgacgacgtcgactaccacgaggatcggcgggcgctggatgctctcattgctgcagtcccgcccgagatgcagttttcgctttcccagaagcggactgccaaggaggcctgggacgccatcgctgcgacccgcatcggcagcgatcgtgcccgcaagaccacactgcaggcacttcgcaaggagtgggagaacctggctttcatgccaggtgaggatgttgatgactttgctctccgcctcaacactctgttgcagaagatggtgcagttcggcgacgacacctacgatgaggagagagctgttgagaagctcttccgttgcatccccgagaagtacaggcagattgctcgctcgatcgagtctctgctagacctctccacgatgacgatcgaagaggcgattggtcgcctcaaggtggtcgacggcgacgaaccacaggctctctctgggcctatcactatcggcgggaagctacatctcactcgggagcagtgggaggcctgccagggtgacaagaaggagtcctcctcgacacgaggccgcaaacgcggcaagccgcgcaaggcgcgtggaggcgcccaggccggggcgcgaggacatgctgagggtggtgcacgtggaggtgcccaaggcggcgccgtcggcaacaagaagccgacacgagacgacggctgccacaactgcggcaagcttggccactgggccagggattgtcggcagccacgacgtggccaggccaacgacgcacaggcggaggcggaggaggaggccctgctcctggcacatgcaagcatcgagccatctccagcggcaccggccgcagcggcactcctccaccttgatgagtcgaaagcacgcgctttcctcggcgacggctccaacaaggacatgatcgaaggatggtgcctcgacaccggcgccactcatcacatgaccggccgacgggagttcttcaccgagcttgactctagcgtccgaggctccgtcaagtttggggacgcctccggtgtagagatcaagggcgccggctcagtcgtcttcaccgccacgtctggtgagcacaggctgctcaccggagtctactacatccccgcgttgagaaactctatcatcagtttgggacagctggatgagaacggttcgcgcgtggaggtcgagcacggagtcatgaggatctgggatccctctcgtcgccttcttgccaaggtacgcaggagtgcaaatcggctttacatcctcaatgtgaaggtggcacaaccttgctgccttgctgctcgtcgagacgacggggcatggcagtggcacgagcgcttcgggcaccttaacttcgaagccttgaagcggctcagcgccaaggagatggtacgaggcctgccgtgccttgaccatgtggagcaattctgcgatgtctgcgtgttgacaaagtagagactgctccccttcccccagcagtcgagcttccgagccaaggagaggctcgagctcgtgcatggggacttgtgtggcccggtgacaccagccacaccaggaggacgacgctacttcttgctgctcgtcgacgatctctcccgctacatgtgggtgatgatccttggcagaaagggagaggctgcgaacgccatcaggcgtgtgcaggtcgctgcggaggcggagtgcggccgcaagctgtgatggaataagtcttgagcatctagaggacagcctgcttttgactgtcctctgtagtcctttagcatctagaggacagcttgactgtcctctgtagtctctttagcatctagaggacagcagtcgctttttgactgtcctctgtagtcgctttagcatctagaggacagcagtcgcttttgactgtcctctgtagtctctttagcatctagaggacaatcctgttgtatagtgtgtgtgagaaggtgtggtagtgcagcccctagggctataaatatgtgtccccaacccctctaagggtatggcattgtgtagtgtttgaggaaataaacagaaaattgccccaactcatagtgtcatcctcttgatgagagttagagtccctctacttacaattggtatcagagccaaactatcctgcagcctaaacatctcgtgttcatctccttcccgcgcctctccccacactcagtcggcagcaagagctccaactgttcctccctcccctgctcagacgagcagcctttcgtctgagacagcctcttccacacgcagcgacccctcactagcccgccatgtccctacgctcggccacttcgagtgcgcggcgccagcaggaggccgaggtcgccgcggcacaagaacgcgagcgagcagcagcagcggctgcagcgacagcgacgagggcagcacggttggcggcggcggaactggcagcggcgagagcggaagtagaagcagcggaggcggcggatgctgcacgtgcggcggcaacagagcttgaggttctgcgcggcagtagagctggcagctctgcttctgtcgacgacaacaccgacgaagagctcaggctggcgagggaagcagcgcgagagcaggcggcacagtgggcagtcgcgcatccccatgggggcgcgcgtggcggcagcccggataggcgtcgacacgctgacggcgctccaggcgggggcgcacgcggcggcagcccagacgggcgtagacgcgccggcggtgctcccggcggcggcgaccgagttgacggagatcgcggcctctacaggcggcgcggttctccctccccggatcggtaccatggtcgtcgcatggcccaagccattgtcagggacatcggtcccggcggtgggtggcctaccctcaccaagaccaactacgtcgagtgggccgtggtgatgagggtacggctccaggttcgccacatgtgggaagcagttcgttacgacgacgtcgactaccacgaggatcggcgggcgctggatgcccccattgctgcagtcccgcccgagatgcagttttcgctttcccagaagcggactgccaaggaggcctgggacgccatcgctgcgacccgcatcggcagcgatcgtgcccgcaagaccacactgcaggcacttcgcaaggagtgggagaacatgaccttcaagccaggtgaggatgttgatgactttgctctccgcctcaacactctgttgcagaagatggtgcagttcggcgacgacacctacgatgaggagagagctgttgagaagctcttccgttgcatccccgagaagtacaggcagattgctcgctcgatcgagtctctgctagacctctccacgatgacgatcgaagaggcgattggtcgcctcaaggtggtcgacggcgacgaaccacaggctctctctgggcctatccctatcggcgggaagctacatctcactcgggagcagtgggaggcctgccagggtgacaagaagcagggggagtcctcctcgacacgaggccgcaaacgcggcaagccgcgcaaggcgcgtggaggcgcccaggccggggcgcgaggacatgctgagggtggtgcacgtggaggtgcccaaggcggcgccgtcggcaacaagaagccggcacgagacgacggctgccacaactgcggcaagcttggccactgggccagggattgtcggcagctacgacgtggccaggccaacgtcgcacaggcggaggcggaggaggaggccctgctcctggcacatgcaagcatcgagccatctccagcggcaccggccgcagcggcactcctccaccttgatgagtcgaaagcacgcgctttcctcggcgacggctccaacaaggacatgatcgaaggatggtgcctcgacaccggcgccactcatcacatgaccggccgacgggagttcttcaccgagcttgactctagcgtccgaggctccgtcaagtttggggacgcctccggtgtagagatcaagggcgccggctcagtcgtcttcaccgccacgtctggtgagcacaggctgctcaccggagtctactacatccccgcgttgagaaactctatcatcagtttgggacagctggatgagaacggttcgcgcgtggaggtcgagcacggagtcatgaggatctgggatccctctcgtcgccttcttgccaaggtacgcaggagtgcaaatcggctttacatcctcaatgtgaaggtggcacaaccttgctgccttgctgctcgtcgagacgacggggcatggcagtggcacgagcgcttcgggcaccttaacttcgaagccttgaagcggctcagcgccaaggagatggtacgaggcctgccgtgccttgaccatgtggagcaattctgcgatgtctgcgtgttgacaaagtagagactgctccccttcccccagcagtcgagcttccgagccaaggagaggctcgagctcgtgcatggggacttgtgtggcccggtgacaccagccacaccaggaggacgacgctacttcttgctgctcgtcgacgatctctcccgctacatgtgggtgatgatccttggcagaaagggagaggctgcgaacgccatcaggcgtgtgcaggtcgctgcggaggcggagtgcggccgcaagctgtgatggaataagtcttgagcatctagaggacagcctgcttttgactgtcctctgtagtcctttagcatctagaggacagcttgactgtcctctgtagtctctttagcatctagaggacaacagtcgctttttgactgtcctctgtagtcgctttagcatctagaggacagcagtcgcttttgactgtcctctgtagtctctttagcatctagaggacaatcctgttgtatagtgtgtgtgagaaggtgtggtagtgcagcccctagggctataaatatgtgtccccaacccctctaagggtatggcattgtgtagtgtttgaagaaataaacagaaaattgccccaactcatagtgtcatcctctgatgagagttagagtccctctacttacaattggtatcagagccaaactatcctgcagcctaaacatctcgtgctcatctccttcccgtgcctctccccacactcagtcggtagcaagagctccaactgttccttcctcccctgctcaaacgagcagcctttcgtctgagacagcctcttccacacgcagcgacccctcactagcccaccatgtccctacgctcggccacttcgagtgcgcggcgccagcaggaggccgaggtcgccgcggcacaagaacgcgagcgagcagcagcagcggctgcagcgacagcggcgagggcagcacggttggcggcggcggaactggcagcggcgagagcggaagtagaagcagcggaggcggcggatgctgcacgtgcggcggcaacagagctcgaggttctgcgcggcagtagagctggcagctctgcttctgtcgacgacaacaccgacgacgagctcaggctggcgagggaagcagcgcgagagcaggcggcacagtgggcagccgcgcatccccatgggggcgcgcgtggcggcagcccggataggcgccgacacgctgacggcgctccaggcgggggcgcacgcggcggcagcccagacgggcgtagacgcgccggcggtgctctcggcggcggcgaccgagtcgacggagatcgcggcctctacaggcggcgcggttctccctccccggatcggtaccatggtcgtcgcatggcccaagccattgtcagggacatcggtcccgacggtgggtggcctaccctcaccaagaccaactacgtcgagtgggccgcggtgatgagggtacggctccaggttcgccacatgtgggaagcagttcgttacgacgacgtcgactaccacgaggatcggcgggcgctggatgctctcattgctgcagtcccgcccgagatgcagttttcgctttcccagaagcggactgccaagaaggcctgggacgccatcgctgcgacccgcatcggcagcgatcgtgcccgcaagaccacactgcagacacttcgcaaggagtgggagaacctggccttcaagccaggtgaggatgttgatgactttgctctctgcctcaacactctgttgcagaagatggtgcagttcggtgacgacacctacgatgaggagagagctgttgagaagctcttccgttgcatccccgagaagtacaggcagattgctcgctcgatcgagtctctgctagacctctccacgatgacgatcgaagaggcgattggtcgcctcaagggggtcgacggcgacgaaccacaggctctctctgggcctatcactatcggcgggaagctacatctcactcgggagcagtgggaggcctgccagggtgacaagaagcagggggagtcctcctcgacacgaggccgcaaacacggcaagccgcgcaaggcgcgtggaggcgcccaagccggggcgcgaggacatgctgagggtggtgcacgtggaggtgcccaaggcggcgccgtcggcaacaagaagccggcacgagacgacggctgccacaactgcggcaagcttggccactgggccagggattgtcggcagccacgacgtggccaggccaacgtcgcacaggcggaggcggaggaggaggccctgctcctggcacatgcaagcatcgagccatctccagcggcaccggccgcagcggcactcctccaccttgacgagtcgaaagcacgcgctttcctcggcgacggctccaacaaggacatgatcgaaggatggtgcctcgacaccggcgccactcatcacatgaccggccgacgagagttcttcaccgagcttgactctagcgtccgaggctccgtcaagtttggggacgcctccggcgtagagatcaagggcgccggctcagtcgtcttcaccgccgcgtctggtgagcacaggctgctcaccggagtctactacatccccgcgttgaggaactctatcatcagcttgggacagctggatgagaacggttcgcgcgtggaggtcgagcacggagtaatgaggatctgggatccctctcgtcgccttcttgccaaggtacgcaggagtgcaaatcggctttacatcctcaatgtgaaggtggcacaaccttgctgccttgctgctcgtcgagacgacggggcatggcagtggcacgagcgcttcgggcaccttaacttcgaagccctgaagcggctcagcgccaaggagatggtacgaggcctgccgtgccttgaccatgtggagcaattctgcgatgtctgcgtgttgacaaagcagagacgactccccttcccccagcagtcgagcttccgagccaaggagaggctcgagctcgtgcatggggacttgtgtggcccggtgaccccagccacaccaggaggacgacgctacttcttgctgctcgtcgacgatctctcccgctacatgtgggtgatgatccttggcagaaagggagaggctgcgaacgccatcaggcgtgtgcaggtcgctgcggaggcggagtgcggccgcaagctgtgatggaataagtcttgagcatctagaggacagcctgcttttgactgtcctctgtagtcctttagcatctagaggacagcttgactgtcctctgtagtctctttagcatctagaggacaatcctgttgtgtagtgtgtgtgagaaggtgtggtagtgcagcccctagggctataaatatgtgtccccaacccctctaagggtaatggcattgtgtagagtttgaggaaataaacagaaaattgccccaactcatagtgtcatcctcttgatgagagttagagtccctctacttacaattggtatcagagccaaactatcctgcagcctaaacatctcttgctcatctccttcccgcgcccctccccacactcagtcggcagcaagagctccaactgttccttcctcccctgctcagacgagcagcctttcgtctgagacagcctcttccacacgcagcgacccctcactagcccacgatgtccctacgctcggccacttcgagtgcgcggcgccagcaggaggccgaggtcgccgcggcacaagaacgcgagcgagcagcagcagcggctgcagcgacagcggcgagggcagcacggttggcggcggcggaactggcagcggcgagagcggaagtagaagcagcggaggcggcggatgctgcacgtgcggcggcaacagagctcgaggttctgcgcggcagtagagctggcagctctgcttctgtcgacgacaacaccgacgacgagctcaggctggcgagggaagcagcgcgagagcaggcggcacagtgggcagccgcacatccccatgggggcgcgcgtggcggcagcccggataggcgccgacacgctgacggcgctccaggcgggggcgcacgcggcggcagcccagacgggcgtagacgcgccggcggtgctcccggcggcggcgaccgagtcgacggagatcgcggcctctacaggcggcgcggttctccctccccggatcggtaccatggtcgtcgcatggcccaagccattgtcagggacatcggtcccggcggtgggtggcctaccctcaccaagaccaactacgtcgagtgggccgcggtgatgagggtacggctccaggttcgccacatgtgggaagcagttcgttacgacgacgtcgactcccacgaggatcggcgggcgctggatgctctcattgctgcagtcccgcccgagatgcagttttcgctttcccagaagcggacagccaaggaggcctgggacgccatcgctgcgacccgcatcggcagcgatcgtgcccgcaagaccacactgcaggcacttcgcaaggagtgggagaacctggccttcaagccaggtgaggatgttgatgactttgctctccgcctcaacactctgttgcagaagatggtgcagttcggcgacgacacctacgatgaggagagagctgttgagaagctcttccgttgcatccccgagaagtacaggcagattgctcgctcgatcgagtctctgctagacctctccacgatgacgatcgaagagtcgattggtcacctcaaggtggtcgacggcgacgaaccacaggctctctctgggcctatcactatcggcgggaagctacatctcactcgggagcagtgggaggcctgccagggtgacaagaagaagggggagtcctcctcgacacgaggccgcaaacgcggcaagccgcgcaaggcgcgtggaggcgcccaggccggcgcgcgaggacatgctgagggtggtgcacgtggaggtgcccaaggcggcgccgtcggcaacaagaagccggcacgagacgacggctgccacaactgcggcaagcttggccactgggccagggattgtcggcagccacgacgtggccaggccaatgtcgcacaggcggaggcggaggaggaggccctgctcctggcacatgcaagcatcgagccatctccagcggcaccggccgcagcggcactcctccaccttgatgagtcgaaagcacgcgctttcctcggcgacggctccaacaaggacatgatcgaaggatggtgcctcgacaccggcgccactcatcacatgaccggccgacgggagttcttcaccgagcttgactctagcgtccgaggctccgtcaagtttggggacgcctccggcgtagagatcaagggcgctggctcagtcgtcttcaccgccgcgtctggtgagcacaggctgctcaccggagtctactacatccccgcgttgaggaactctatcatcagcttgggacagctggatgagaacggttcacgcgtggaggtcgagcacggagtcatgaggatttgggatccctctcgtcgccttcttgccaaggtacgcaggagtctaaatcggctatacatcctcaatgtgaaggtggcacaaccttgttgtcttgctgctcgtcgagacgatggggcatggcagtggcacgagcgctttgggcaccttaacttcgaggccctgaagcggctcagtgccaaggagatggtacgaggcctgccgtgccttgaccatgtggagcaattctgcgatgtctgcgtgttgacaaagcagagatggctcccctttccccagcagtcgagcttccgagccaaggagaggcttgagctcgtgcatggggacttgtgtggcccggtgacaccagccacaccaggaggacgacgctacttcttgctgctcgtcgacgatctctcccgctacatgtgggtgatgatccttggcagcaagggagaggctgcgaacgccatcaggcgtgtgcaggtcactgcggaggcggagtgcggccgcaagctgcgcgtgctgcgcaccaacaacggcggcgaattcacgacggctgagttcgcgtcgtactgcgcggatgagggcgttcagcgccactactccgcgccgtacagcccgcagcagaacggcgtcgtcgagcggcgcaaccagacggttgtggggatggctcgggctctcctcaagcagagaggaatgccagctgtcttctggggagaggcggtggtgacagcgggttacatcctcaaccgctcgcccaccaaggctctcaacgggatgacaccgtacgaggcttggcatgggcgcaagccggcggtctctcacctacgggtcttcggctgcctcgcgttcaccaaggagcttggccacatcagcaagctcgacgataggagcaccccgggggtgttcattggctacgcggagggctcgaaggcctaccgcatctttgacccaagaacacagcgtgtgcgcacggcgcgcgacgtagtgttcgacgaagggcgaggttgggcgtgggacaaggcggtggacgacggcacgactccgacgtacgacttcaccatcgagtacgtccactttgagggagctgggggagtaggcaactcttctccgagcaggtctaccccagcccccaagtctccaccgcctccagcgccactctctccagctcctgctacaacgagctcttcaccaccacgcactccagccacgactccggctacagcgagctcttcgccaccacgtactccagcaccgacggtaccctctccgggaacgtcctctccgacaccagctcgtgtcgagcacgacccagtggagctcgtgacccctctgtcccgcgacgaggagcgcgtcgacgcgtgctacgccggcgagccgttgcggtatcgaagggtggagggccttctcatcgacccgtcggtgccaggccctgcatctcgcattctggcaggagagttgcatcttgcatgcgacgatggtgagcctcggtctttcgcggaggccgagcaacatgcggcttggcgtgccgcgatgcagtcggagatggacgcggttgagacgaaccgcacttgggagctcgctgatctccctcatggtcatcgcgcgatcacccttaagtgggtgttcaaactgaagagggatgaagccggcgccatcgtcaagcataaggctcgcttggtggcacgcggtttcttgcagcaggaggggatcgacttcgacgatgccttcgcccctgtagcacggatggaatccgtgcgactccttgcgctggcagccctggagggctggcatgttcatcacatggatgtcaagtcggcgtttcttaacggcgacttaaaggaggaggtctatgtacaccagccgccaggttttgcgatccctggcaaggagggcaaggtgttgcgcctgcgcaaggctctctacggcttgcgacaggcaccaagggcgtggaatgccaagctggattccacgctcaagaggatgggcttcatgccaagcccgcacgaggcggccatctatcgacggggcaatggagaaaatgccctgctggtgggtgtctacgtcgacgacttggtgatcaccggcgccaaggatgcagaggtggcagcgttcaaggaagagatgaaggccaccttccaaatgagtgacctggggcatctctccttctacctggggattgaggtgcaccagggagactccgggatcacacttcgccagaccgcctacgccaagcgcattgttgagctggctgggctcatcgactgcaacccagctctcactccgatggaggagaggctgaagctgagtcgcgacagcacgacgaaggaggtggatgctacacagtaccggcgtcttgtggggagccttcgctacctcgtccacacacggcctgacttggcatactccgtcggctacgttagtcggtttctgcagcgatcgacgacggagcatgagcaggctgtgaagaggatcatccgctatgttgcggggactctcgaccacggtctctactacccgaggtgccctggggaggcacaccttgtcgggtacagcgatagcgaccacgccggcgacatcgacaccagcaagagcacaagcgggatcctcttcttcctcggcaagtgccccatcagctggcagtcggtcaagcagcaggtggtggccatgtccagctgcgaggccgagtacatagcagcgtccactgcttcgactcaggctctctggctggctcgactgctcggtgatctcctcgggagagacactggagcggtggaactcagggtggacagccagtccgctctggcattggccaagaaccccgtgttccatgaacggagcaagcacatccggctgagataccacttcatccgagactgcttggcagaagggagcatcaaggcgtgctacatcaacaccaaggatcagcttgcagacctgctcaccaagccccttgggaagatcaagtttgttgagctttgctccaggtccgggatggcccaactttctcacaagacgacgcccaagacttagggggagaatgatggaataagtcttgagcatctagaggacagcctgcttttgactgtcctctgtagtctctttagcatctagaggacagcagtcgctttttgactgtcctctgtagtcgctttagcatctagaggacagcagtcgcttttgactgtcctctgtagtctctttagcatctagaggacaatcctgttgtatagtgtgtgtgagaaggtgtggtagtgcagcccctagggctataaatatgtgtccccaacccctctaagggtatggcattgtgtagtgtttgaggaaataaacagaaaattgccccaactcatagtgtcatcctcttgatgagagttagggtccctctacttacaagctgcgcgtgctgcgcaccgacaacggcggcgaattcacggcggctgagttcgcgtcgtactgcgcggatgagggcgttcagcgccactactccgcgccgtacagcccgcagcagaacggtgtcgtcgagcggcgcaaccagacggttgtggggatggctcgagctctcctcaagcagagaggaatgccagctgtcttctggggagaggcggtggtgacagcggtttacatcctcaaccgctcgcccaccaaggctctcaacgggatgacaccgtacgagacttggcatgggcgcaagccggcggtctctcacctacgggtcttcggctgcctcgcgttcaccaaggagcttggccacatcagcaagctcgacgataggagcaccccgggggtgttcattggctacgcggagggctcgaaggcctaccgcattcttgacccaagaacacagcgtgtgcgcacggcgcgcgacgtagtgttcgacgaagggcgaggatgggcgtgggacaaggcggtggacgacggcacgactccgacgtacgacttcaccatcgagtacgtccaatttgagggagctgggggagtaggcaactcttctccgagcaggtctaccccagcccccaagtctccaccaactccagcgccacactctctagctcctgctacaacgagctcttcaccaccacgcactccagccacgactccggctacagcgagctcttcgccaccacgtactccagcaccgacggtaccctctctgggaacgtcctctccgacaccagctcgtgtcgagcacgacccagtggagctcgtgacccctctgtcccgcgacgaggagcgcgtcgacgcgtgctacgccggcgagccgttgcggtatcgaagggtggagggccttctcatcgacccgtcggtgccaggccctgcatctcgcattctggcaggagagttgcatcttgcatgcgacgatggtgagcctcggtctttcgcggaggccgagcaacatgcggcttggcgtgccgcgatgcagtcggagatggacgcggttgagacgaaccgcacttgggagctcgctgatctccctcatggtcatcgcgcgatcacccttaagtgggtgttcaaactgaagagggatgaagccggcgccatcgtcaagcataaggctcgcttggtggcacgcggtttcttgcagcaggaggggatcgacttcgacgatgccttcgcccctgtagcacggatggaatccgtgcgactcctcctcgcgttggcagccctgaagggctggcatgttcatcacatggatgtcaagtcggcgtttcttaacggcgacttaaaggaggaggtctacgtacaccagccgccaggttttgcgatccctggcaaggagggcaaggtgttgcgtctgcgcaaggctctctacggcttgcgacaggcaccaagggcgtggaatgccaagctggattccacgctcaagaggatgggcttcatgccaagcccgcacgaggcggccatctatcggcggggcaatggaggaagtgccctgctggtgggtgtctacgtcgacgacttggtgatcaccggcgccaaggatgcagaggtggcagcattcaaggaagagatgaaggccaccttccaaatgagtgacccggggcacctctccttctacctggggattgaggtgcaccagggggactccgggatcacacttcgccagaccgcctacgccaagcgcattgttgagctggctgggctcaccgactgcaacccagctctcactccgatggaggagaggctgaagctgagtcgcgatagcacgacggaggaggtggacgctacacagtaccggcatcttgtggggagccttcgctacctcgtccacacacagcctgacttggcatactccgtcggctacgttagtcggtttctgcagcgaccgacgacggagcatgagcaggctgtgaagaggatcatccgctatgttgcggggactctcgaccacggtctctactacccgaggtgccctggggaggcacaccttgtcgggtacagcgatagcgaccatgccggcgacatcgacaccagcaagagcacaagcggaatcctcttcttcctcggcaagtgccccatcagctggcagtcggtcaagcagcaggtggtggccatgtccagctgcgaggtcgagtacatagcggcgtccactgcttcggctcagacgctctggctggctcgactgctcggtgatctcctcgggagagacactggagcggtggaactcagggtggacagccaatctgctctggcattggccaagaaccccgtgttccatgaacggagcaagcacatccggctgagataccacttcatccgagcctgcttggcagaagggagcatcaaggcgcgctacatcaacaccaaggatcagcttgcagacctgctcaccaagccccttggtaagatcaagtttgttgagctttgctacaggtccgggatggcccaactttctcacaagacgacgcccaagacttagggggagaatgatggaataagtcttgagcatctagaggacagcctgcttttgactgtcatctgtagtcctttagcatctagaggacagcttgactgtcctctgtagtctatttagcatctagaggacagcagtcgcttttttgactgtcctctgtagtcgctttagcatctagaggacaacagtcgcttttgactgtcctctgtagtcgctttagcatctagaggacaatcctgttgtgtagtgtgtgtgagaaggtgtggtagtgcagcccctagggctataaatatgtgtccccaacccctctaagggtatgccattgtgtagtgtttgaagaataaacagaaaattgccccaactcatagtgtcatcctcttgatgagagttagagtccctctacttacagagccatctccagcggcaccggccgcagcggcactcctccaccttgatgagtcgaaagcacgcgttttcctcggcgacggctccaacaaggacatgatcgaaggatggtgcctcgacaccggcgccactcatcacatgaccggccaacgggagttcttcaccgagcttgactctagcgtccgaggctccgtcaagtttggggacgcctccggcgtagagatcaagggcgccggctcagtcgtcttcaccgccgcgtctggtgagcacaggctgctcaccggagtctactacatccccgcgttgagtaactctatcatcagcttgggacagctggatgagaacggttcgcgcgtggaggtcgagcacggagtcatgaggatctgggatccctctcgtcgccttcttgccaaggtacgcaggagtccaaatcggctatacatcctcaatgtgaaggtggcacaaccttgctgccttgctgctcgtcgagacgacggggcatggcagtggcacgagcgcttcgggcaccttaacttcgaagccctgaagcggctcagcgccaaggagatggtacgaggcctgccgtgccttgaccatgtggagcaattctgcgatgtctgcgtgttgacaaagcagagacgactcccctttccccagcagtcgagcttccgagccaaggagaggctcgagctcgtgcatggggacttgtgtggcccggtgacaccagccacaccaggaggacgacgctacttcttgctgctcgtcgacgatctctcccgctacatgtttgtgatgatccttggcagcaagggagaggctgcgaacgccatcaggcgtgtgcaggtcgctgcggaggcggagtgcggccgcaagctgcgcgtgctgcgcaccgacaacggcggcgaattcacggcggctgagttcgcatcgtactgcgcggatgagggcgttcagcgtcactactccgcgccgtacagcccgcagcagaacggcgtcgtcgagcggcgcaaccagacggttgtggggatggctcgggctctcctcaagcagagaggaatgccagctgtcttctggggagaggcggtggtgacagcgggttacatcctcaaccgctcgcccaccaaggctctcaacgggatgacaccgtacgaggcttggcatgggcgcaagccggcggtctctcacctacgggtcttcggctgcctcgcgttcaccatggagcttggccacatcagcaagctcgacgataggagcaccccgggggtgttcattggctacgcggagggctcgaaggcctaccgcattcttgacccaagaacacagcgtgtgcgcacggcgcgcgacgtagtgttcgacgaagggcgaggatgggcgtgggacaaggcggtggacgacggcacgactccgacgtacgacttcaccatcgagtacgtccaatttgagggagctgggggagtaggcaactcttctccgagcaggtctaccccagcccccaagtctccaccaactccagcgccacactctctagctcctgctacaacgagctcttcaccaccacgcactccagccacgactccggctacagcgagctcttcgccaccacgtactccagcaccgacggtaccctctccgggaacgtcctctccgacaccagctcgtgtcgagcacgacccagtggagctcgtaacccctctgtcccgcgacgaggagcgcgtcgacgcgtgctacgacggcgagccgttgcggtatcgaagggtggagggccttctcctcgacccgtcggtgccaggccctgcatctcgcattctggcgggagagttgcatcttgcatgcgacgatggtgagcctcggtctttcgcggaggccgagaaacatgcggcttggcgttctgcgatgcagtcggagatggacgcggttgagacgaaccgcacttgggagctcgctgatctccctcatggtcatcgcgcgatcacccttaagtgggtgttcaaactgaagagggatgaagtcggcgccatcgtcaagcataaggctcgcttggtggcacgcggtttcttgcagcaggaggggatcgacttcgacgatgccttcgcccctgtagcacggatggaatccgtgcgactcctcctcgcgctggcagccctggagggctggcatgttcatcacatggatgtcaagtcggcatttcttaacggcgacttaaaggaggaggtctacgtacaccagccgccaggttttgcgatccctggcaaggaaggcaaggtgttgcgcctgtgcaaggccctctacggcttgcgacaggcaccaagggcgtggaatgccaaactggattccacgctcaagaggatgggcttcatgccaagcccgcacgaggcggccatctatcggcggggcaatggagaaaatgccctgctggtgggtgtctacgtcgatgacttggtgatcaccggcgccaaggatgcagaggtggcagcattcaaggaagagatgaaggccaccttccaaatgagtgacccggggcacctctccttctacctggggattgaggtgcaccagggggactccgggatcacacttcgccagaccgcctacgccaagcgcattgttgagctggctgggctcaccgactgcaacccagctctcactccgatggaggagaggctgaagctgagtcgcgatagcacgacggaggaggtggacgctacacagtaccggcgtcttgtggggagccttcgctacctcgtccacacacagcctgacttggcatactccgtcggctacgttagtcggtttctgcagcgaccgacgacggagcatgagcaggctgtgaagaggatcatccgctatgttgcggggactctcgaccacggtctctactacccgaggtgccctggggaggcacaccttgtcgggtacagcgatagcgaccatgccggcgacatcgacaccagcaagagcacaagcggaatcctcttcttcctcggcaagtgccccatcagctggcagtcggtcaagcagcaggtggtggccatgtccagctgcgaggtcgagtacatagtggcgtccactgcttcggctcagacgctctggctggctcgactgctcggtgatctcctcgggagagacactggagcggtggaactcagggtggacagccaatccgctctggcattggccaagaaccccgtgttccatgaacggagcaagcacatccgactgagatagcacttcatccgagcctgcttggcagaagggagcatcaaggcgcgctacatcaacaccaaggatcagcttgcagacctgctcaccaagccccttggtaagatcaagtttgttgagctttgctccaggtccgggatggcccaactgtctcacaagacgacgcccaagacttagggggagaatgatggaataagtcttgagcatctagaggacagcctgcttttgactgtcatctgtagtcctttagcatctagaggacagcttgactgtcctctgtagtctctttagcatctagaggacagcagtcgcttttttgactgtcctctgtagtcgctttagcatctagaggacaacagtcgcttttgactgtcctctgtagtcgctttagcatctagaggacaatcctgttgtgtagtgtgtgtgagaaggtgtggtagtgcagcccctagggctataaatatgtgtccccaacccctctaagggtatgccatagtgtagtgtttgaagaaataaacagaaaattgccccaactcatagtgtcatcctcttgatgagagttagagtccctctacttacagagccatctccagcggcaccggccgcagcggcactcctccaccttgatgagtcgaaagcacgcgttttcctcggcgacggctccaacaaggacatgatcgaagaatggtgcctcgacaccggcgccactcatcacatgaccggccaacgggagttcttcaccgagcttgactctagcgtccgaggctccgtcaagtttggggacgcctccggcgtagagatcaagggcgccggctcagtcgtcttcaccgccgcgtctggtgagcacaggctgctcaccggagtctactacatccccgcattgagtaactctatcatcagcttgggacagctggatgagaacggttcgcgcgtggaggtcgagcacggagtcatgaggatctgggatccctctcgtcgccttcttgccaaggtacgcaagagtccaaatcggctatacatcctcaatgtgaaggtggcacaaccttgctgccttgctgctcgtcgagacgacggggcatggcagtggcacgagcgcttcgggcaccttaacttcgaggccctgaagcggctcagtgccaaggagatggtgcgaggcctgccgtgccttgaccatgtggagcaattctgcgatgtctgcgtgttgacaaagcagagacggctcccctttccccagcagtcgagcttccgagccaaggagaggctcgagctcgtgcatggggacttgtgtggcccggtgacaccagccacaccaagaggacgacgctacttcttgctgctcgtcgacgatctctcccgctacatgtgggtgatgatccttggcagcaagggagaggctgcaaacgccatcaggcgtgtgcaggtcgctgcggaggcggagtgcggccgcaagctgcgcgtgctgcacaccgacaacggcggcgaattcacggcggctgagttcgcgtcgtactgcgcggatgagggcgttcagcgccactactccacgccatacagcccgcagcagaacggcgtcgtcgagcggcgcaaccagacggttgtggggatggctcgggctctcctcaagcagagaggaatgccagctgtcttctggggagaggcggtggtgacagcgggttacatcctcaaccgctcgcccaccaaggctctcaacgggatgacaccgtacgaggcttggcatgggcgcaagccggcggtctctcacctacgggtcttcggctgcctcgcgttcaccaaggagcttggccacatcagcaagctcgacgataggagcaccccgggggggttcattggctacgcggagggctcgaaggcctaccgcatccttgacccaagaacacagcgtgtgcgcacggcgcgcgacgtagtgttcgacgaagggcgaggatgggcgtgggacaaggcggtggacgacggcacgactccgacgtacgacttcaccatcgagtacgtccactttgagggagctgggggagtaggcaactcttctccgagcaggtctaccccagcccccaagtctccaccgactccagcgccacactctccagctcctgctacaacgagctcttcaccaccacgcactccagccacgactccggctacagcgagctcttcgccaccacgtactccagcaccgacggtaccctctccgggagcgtcctctccgacaccagctcgtgtcgagcacgacccagtggagctcgtgacccctctgtcccgcgacgaggagcgcgtcgacgcgtgctacgacggcgagccgttgcggtatcgaagggtggagggccttctcatcgacccgtcggtgccaggccctgcatctcgcattctggcaggagagttgcatcttgcatgcgacgatggtgagcctcggtctttcgcggaggccgagaaacatgcggcttggcgtgctgcgatgcagtcggagatggacgcggttgagacgaaccgcacttgggagctcgctgatctccctcatggtcatcgcgcgatcacccttaagtgggtgttcaaactgaagagggatgaagccagcgccatcgtcaagcataaggctcgcttggtggcacgcggtttcttacagcaggaggggatcgacttcgacgatgccttcgcccctgtagcacggatggaatccgtgcgactcctccttgcgctggcagccctggagggctggcatgttcatcacatggatgtcaagtcggcgtttcttaacggcgacttaaaggaggaggtctacgtacaccagccgccaggttttgcgatccctggcaaggagggcaaggtgttgcgcctgcgcaaggctctctacggcttgcgacaggcaccaagggcgtggaatgccaagctggattccacgctcaagaggaagggcttcatgccaagcccgcacgaggcggccatctatcggcggggcaatggagaaaatgccctgctggtgggtgtctacgtcgacgacttggtgatcaccggcgccaaggatgcagaggtggcagcattcaaggaagagatgaaggccaccttccaaatgagtgacttggggcatctctccttctacctggggattgaggtgcaccagggagactccgggatctcacttcgccagaccgcctatgccaggcgcattgttgagctggctgggctcaccgactgcaacccagctctcactccgatggaggagaggctgaagctgagtcgcgacagcacgacggaggaggtggatgctacacagtaccggcgtcttgtggggagccttcgctacctcgtccacacacgacctgacttggcatactccgtcggctacgttagtcggttcttgcagcgaccgacgacggagcatgagcaggctgtgaagaggatcatccgctatgttgcggggactctcgaccacggtctctactacccgaggtgccctggggaggcacaccttgtcgggtacagcgacagcgaccacgccggcgacatcgacactagcaagagcacaagcgggatcctcttcttcctcggcaattgcctcattagctggcagtcggtcaagcagcaggtggtggccatgtccagctgcgaggccgagtacatagcggcgtccactgcttcgactcaggcgctctggctggctcgactgctcgnnnnnnnnnnnnnnnnnnnnnnnnnnnnnnnnnnnnnnnnnnnnnnnnnnnnnnnnnnnnnnnnnnnnnnnnnnnnnnnnnnnnnnnnnnnnnnnnnnnnnnnnnnnnnnnnnnnnnnnnnnnnnnnnnnnnnnnnnnnnnnnnnnnnnnnnnnnnnnnnnnnnnnnnnnnnnnnnnnnnnnnnnnnnnnnnnnnnnnnnnnnnnnnnnnnnnnnnnnnnnnnnnnnnnnnnnnnnnnnnnnnnnnnnnnnnnnnnnnnnnnnnnnnnnnnnnnnnnnnnnnnnnnnnnnnnnnnnnnnnnnnnnnnnnnnnnnnnnnnnnnnnnnnnnnnnnnnnnnnnnnnnnnnnnnnnnnnnnnnnnnnnnnnnnnnnnnnnnnnnnnnnnnnnnnnnnnnnnnnnnnnnnnnnnnnnnnnnnnnnnnnnnnnnnnnnnnnnnnnnnnnnnnnnnnnnnnnnnnnnnnnnnnnnnnnnnnnnnnnnnnnnnnnnnnnnnnnncgagagctgtctcactgagttgtgagtttgaagcagtctttccgcatttgcgcggggggggggtgatggaataagtcttgagcatctagaggacagcctgcttttgactgtcctctgtagtcctttagcatctagaggacaacagtcgctttttgactgtcctctgtagtctctttagcatctagaggacaacaatcgcttttgactgtcctctgtagtcgctttagcatctagaggacagcagtcgctttttgactgtcctctgtagtctctttagcatctagaggacaatcctgttgtgtagtgtgtgtgagaaggtgtggtagtgcagcccctagggctataaatatgtgtccccaacccctctaagggtatagcattgtgtagtgtttgaggaaataaacagaaaattgacccaactcatagtgtcatcctcttgatgagagttagagtccctctacttacagggggagacttgtctcggtttatccctcccttagaccccactcatgtgggagcctccgacattggatgtactctatttgttttaaatatatgcagataaatattattttctaacaatggtgctaattcatgtataaaagtaaggagtaaaatgcatcaggtccccgaactctcaaaactaggattacgtgtcttcgaacttgacgtcttggccggtcatccaaaaccagatttgctcaaactggatgccgatgtggcgtgccatgttggagtcactttggtccccgaacttggcatgctgtatcacttgggtctcagaacttggcattttgtgccacttggcttcccgaactttctttagtacgcttcagcgtggcatgctacgttggcatcgggtttgaacaaactcggttttggatggccgactaagttcgaggacccgttttgctggttttgaaaattcgatgacccaagtgacaaatcatgctaagttcgaggaccactgatgtattttactcaaagttaagttttgggatgtgtttattgggctagggcatgctagtggggtttctctcgttgcaaaacaggggcttgtttgcaaatagttctaaaggcaccttgtgtgtgaaatgtgggttctgtgtgccaatgtcaacaagttttatggatcttgattatagatcgaattgctagaaatatagtagttcaaacagatattggaactggagctacaatttagtcattaatatactattacttcaagtatgtatgggtatcaactatcaaacataggttgtgtttgcttcagcatctgaaaagtgcttctgctctactttattgtattacaatttaactagcaccttggactatacttttggcttccaaccttttacttctccaaatggttggaaacagaaagaaattttacatgtgtatccagggcatgcttatcaagacgtccattaagcgtcacattagagtcgctttagcgctaaggcgcactcacagggcaaggcgtctagcttgccttgtgctggggagtaagacgtccgccgcggcgtaaggcgctggtggggcgtcggcagggcgttctcggagcgtcggcggggcgacgcttaggggataggtagggttttgaagggcgacggctggaaacagagaagagggtttgacctgtgtctgtgtggcagctgcagctgctgcctccttcctcgtcggcgcgcagtgctccggccatcggaggtgggagactgcggtggaagaaccgagggagagagagagaggagagctgtgggggagggagagagaggggactgaagagagatgcagcgtgagggaaaaatagaggctggcggctgctactaggttgctggcggctgtgacctaaaactgtgttttgggctgagctgggccgagttgggctggactcacttgttgtgaggttctttcctgccttttttttctgcttctactagactgaaattggacatattagaccttataaaagtgctagcttgcttattaactttaaattagtgatatataaataatgtttgatctaatttttttgatatttatctatataactaaggcctcgcctcgccttacgctttatcgcctaaaagataaaagagggttggtcgccttatgtcgccttaccgccttaataactatgatcaagggagagaaagaaaggggtaggcttcatagttgtttcaaccaaacaatttatctttttcatagtgcatagctcacatcatcttttccaaagctcacaactcacaacaacttttctatagcttagttgacccaaacaagcccataattgctttttgtttggacctaccagctaattactcatgtgagagcctctgacactaggtttgtcctactaactaactacacaacacatcataggtacgtaacctttagctctctagaaaacttgggcaagtaattcagccaccctgaaatggtgctctataaatgtctcggcttgccaaattttgtttgggccagccaaaatttgacctccaccttgggctcaactctctgaccatattgggcgcttggatcatatggaatggaaccactgtaactgttgttttattgatttttttctcgaaaagcgcaggagaactgcaccccattatattaagaccgttgtttttattgatgctaagtgtttctgaagccatgatcgtggcaggagaagagcgtcaactttggtctatgacaggggctagaggaatctcctgcttgattgtccccaaggttttgagtgcttttttagatgggacattctatgtctcctttttaatcagtgtgtttgtaactattaaatgtggtgtttgttgtgtgggttgtggttcctaaccgaatttcttcttaatataataaagtgccatctctactgcattttcgagaactttttttgacctccaagtggttgccagattgttggggcacgaccaaattttgattttgcatcctatgagtctcatactaaacgtgtcgtgaatatccttgttttatccatgatcattcatttattcatttgcttgtgccttctgtgtagacatgttttttttgcaggtatatgtgtggttgcacactcataagttgcagttgctactaccttgttagttagtctatggttttgctgctttgattgaaccaaaataaaatgttagttgcaaacttttgtcaactcagctgtgtctgtcatttgtttagtattgtcctccattatcattaaggatcagagactttgtaaatggattagtttttcatgaatgttatgatgaaaaatgatattgttctgttctttaaatatattctttgctcgcaacttatattaattgtccttgggctatgttctcatgtctattgcaggttgaatgtttacttgtagaaggtgtcttgggcaaaaggaatcttgtgtattgtgcatccacgaggtgtttgcagatctttcatgtcgttcatacatggacatacctacacacttcacattctcagatgcgtactgtttttttttcaaattccttttctatctaatcttatgtgtatattttttgttgttaaatttgcagtgctggtaaaagttttgttgctgaagttctgatgttgaggcagatactgtcaactgggaatatggcaattcttgtccttccctatgtgtcaatatgcgctgaaaaggtttttgatgatttatacagctttggattggtctgaaacatacttgtgtttgattatttatttatcttttacaggctgaacatcttgaacaacttcttgagccactgggtaggcatgtccgtagcttctacggaaaccaggggggaggctcacttcctaaagatacagcagttgctgtatgtaccatagagaaggcaaactctttggtaaacaagttgttggaggatggccgcctctctgaacttggtgtaattgtcatagatgaacttcatatggtaagcttgtctaaaaccgaagtgctgctcagaacatcctctctttgctttaaaccttttgttgttggtactttcatggttatttataccacatctattttgttatgcaagttcattgccttaggaactgtcatttcagcaatctaggtttgtgacagcattgagagtactaacgtaattttgtaacatttccattgtttgtaatcttttaatagcatgcacgagataattgccatttaatgaggatatttgttggcctgttgttagctattagtgctccttggccagtgtgcattgtggaattggatttgttttatgaaacagatggagcactagagatctggtactatctggaatctaaaaagtagagcgtgtgcattttgtatgactttcttctttaattaatacaatgatacagaactctcctgcatattgaagaaaaaacgatgtacaattgcattgcaagtagtagaggttttatcattgctaactaagagcactacaaattcttgtataggtggtgtatgtggtattggtgtactgcatatatcaatcagaacttcaaatatgatttttcctctcccccttctctccgcctgggccgttagggagtgaattcagtccaacgcctaggggctagggccaccaatctagtccaagtgatgtacctttccctactgcatcattgtttagttttttaggtgttcttttttgttcaaggtttgggatggttagtcatcaacttatcacccatcctatctaatcaagtaatcttgtgtgttactttacctgttacccgagtttccatattgttaggttataatcattaagagtaatttgtaaataagaaaggtttgtcattatggacaattgccagtaaacaagaaacaacaaggagaagtaccattggtcctggcgctgaatgaattctggcagcatacttatcaaatgcaaatcatataggaagatttgactttccttagggctcccctcatatatttgtaatattaggcccaggaccaatagtctcccagctcgccattcggctaaagcactatggcagtattactatttagcaacccctaccaaaggaagcatatagcttgcatctttacctgtctttgtttacctttccatgcccttgagggttctttcaatctttcttcctgtatcctttgacttagtttgtcgaacatgatgtgatatatagttgaaacttgttaagttctccaattatgcaattaaattaacaggttggtgaccaacatagaggatatcttttagagctgatgttgacaaagcttcgatatgctgctggtgaagggactttacagtcatgtagcggagaagtttcaagttctagcagtgggaagattgcaagtcatgggttgcagataattggtatgagtgctactatgcccaacatcgctgcggtggctgattggcttcaagtaagatatttaattctcctagttttatgtacttaatgaagggatgttttactagtgtgagaaacaacattactaacccacagaagttcaacttagcattgtcgttcatttatcatattagaaagttcaaaggcatttgataaatatgtgagcaattgaacttcctaattccacttgtattttctttcatcaactttttaaggttttttttgctgtctttcttcaaacctatagcctaacatgatatcttcatcaatattatctgatcgtatgatcgaggctactcgtatgaccaccgatcatatgactaatcactattagtcatcgattagttggtctagccagctagtcgaacatttagttgtccatgtgcctagatgacctaatcgaccatgccgagttagtatccatcgctagtctccttcgcgtcgccccacatgggcaacacgggcggaaccaaccctagcaacgcaccttcttcctcacctgattctcctcaccgtcactagagcgcgacttcacaaggaaggcaatggcatgtcattctcctctgcctcgtgatcatcgactctatcaagctcctctaccatggtttgagaaggtgctcctcccagtggccaatctctagattctagatccaccgatctctaggccagacctgcgctggttgggcctatggtggccacacagtggcagtgcagttgtcccctctcctctcacaactcttcgttcgtctttggtgggtgatgcctagatccatcgtcactgtagccggatcaggcatctcccgtgacaacggatctgcggagggcgacaacccttgtggtcccaacttcattttcaagcatgttcgggtgcttctcggctctagcactcggtcaactttggcttggcattggcatgtggcgcaaatgcaatagcaactgcattgctagcttgcatggccaccaaggatgggtgctcttagtgaggcaaacaagtgccaaacctgcaaccatgacataggagatggtgggcttgctcaggcttgcgttggtgtttgtcggtacctcaagactagggtacccactcctactggatcaaggcgggacccctgtggctatccctagtcgcatagccacaggtggtccgccctggctcagaatataggttcgtccgacgaggccgctggcctcaggtgggggccaacttccatgttgggctcttcagatccctagcagcggggctccgaagccgccacatgctccaagtatggggactccctacagctttgcctaggggcctgaccccctctgggtggtcccggacacctgcgtatgctacttgaacctccgacttaaagaggtccggtattgccacgtgtttaggcccgtgccagagggtcccggactcctctgagtaccttccgaacccccaactagtggtgctccggatctgccacgtctacagacactcctggctgattgctccctgctcgggtaaagatccggtgctgccacgtgtcttatggcgtgtgacataagccgtcgggaagagcctggcgtaagcctctggcaaggggaagggccacctgtgttcaaggcgggcagagtgcgcggctgttcacacaagtaatagatggcgcgtaccccgcattaaatgtaggtggcgtgcgcaacctgcaaggcctgcccgcgtcagaatcgcgttaccaaggcaagcccattgcgtagcttggacgcccttcattatgacttctattcctcgcgtgttattgaggcatgagggaacaggcggaggggacgggatgacaccgtccttattctccctacgctcacctacgccgcaacctacgttgtagcctttgcccacatgtcgtagcccctcctcatcttaggattagggcgggtgttatccgtcacctgtctggagtttacctctgaccgtgttgatgtttgtgtggttcgtctctaggtggtctttatagggcacgacaaccatggttggctacaacgagccttgtttgtgggcgtagcttttcacctgcaatggctctgaactagctcgagagttgcatgcggtggtggacgacaatcaacttcaccaggactacatgagtaactatgttgactacacatgttggtgtgaggagagatcttggtgcaagatttggttagtattatcttgagtcgatgatgataacacctttggggggggtgccattcccttttttggaagcgtcgatgaggtgccgtctctccttaccccacgatttgttttgaagaagctctgcctagggtccctaggctggtgatggcggcgcccagcgtcgtatcctgcctgagggcatcaccttgatcccgtactaccatggttgttggtccgcatgggacatttgctgcttgtttgtaagcctcaggttttgatgagttcgctacttgcttaaagcatgtcttttgctctcctagggtagatcaataggtgaagtcagagctgcttttgtggggtgcaacaaagcttggcaatgatgacacattatgttcacttccttcaaaagccgggtcttgttgtgagtaggtggtggtgtgttagggctttggctgatgttcgttgtgggaaatcagatctacgtatcacttttgtgggataagctcgacatcgatgacgtgtggtgtgctctgttggttgtttttgtgtatgtgggttgcttaggattagtcgtatgggttgttgtgtttaggtattggccggttttcctttgataaactgtgtgatgtggtgttttatccctgggtttccttataacctaggtcaattctatttcttaattgaaacttcctagttcctactgcgttaaaaaatgacctgatcaaccatgtatataaataaatttgatataaattggtgaatgggagaggcaagcaaccaagcacattaataacatttccaccttcctctccggcgcggacgtcgcccacctctacgcgtctagcatcgccgccgccgctactacggctccccaggcgttcaccgtgaccaccgccgctgctgcagccactgcggctggactcctacccccaacctctatagcagcctcgacctccctggctacctgacctccacggccgccttcagtgccgcctcgacattcgggactctctccccgaccgacttctcccggcagtcgcccctcggtttcaccgcccgcctgtcgtcgacgtcacttgggctccaccacgtgccgtcgcgccgtccaacgactccgccttggtcgctgccatcgccaccatccaggccgccgtggccgcctcacaggagcgccaacgcgtcgcattactccctctggagcaggaatgggccatgggttaggccctgaccactcagctggccacggctcagcgtatgcttctcggtcgtggcaccccgccaccaccggcagtgcttgcggctcccctggtggtcccggagcctcctcatggctctgggcttgacgtcgacactatcgccgccctccacgcctaggccgctggggttcacaacatacagtccctcatgttggacccgacgtcctcccactaacctcactggcgcgctcaggtggtcctcacccttcggcgtttgccctcactgaccacgtcctcgacgatctcgttgcctcgctgtccccctcctgggtctagatggacaacgtggtcctatcgtggctcaacgacacaatcaccgttgagctgcaggacatcgtctgtgatcaggcagacactgcgcgccagacatggcttgctctcgagggccagttccccaggaaccaggaggctcgggtgctccacctcgacgtccagttccatctgttttctcaggggacctctctgtgggagagtactgccgccagatgaagggcatggcgaactctctccgcgacctcggtgagcctgtcgccgacaacaccaaggtgctgaaccttctacgtggcctcagcccccgctacggccaccggaaggctctcatcaagaggaccgtgcctcaactcccgctatggtcctctcatcaagaggaccatgccgtgcggaacgagcttctttttgagtagctcaccatggagaccgaggctcctccggcatcgacactctacaacgctcctcccggcggtcagacaccctcggggggccaggcctctcgctctccatcgaccgaggcccctgctcgccatccacccgctgtcattgcgactcctcgtccggctttcaccgccgacggaggtcgtcgctccctcaagggcggccgtggggtggcagctccacccgtggtggtccctccggccggggtggcggccaggcgtgaccgtcattctacaacccctggaccaggaccatcgccatgtggccgggctaggcctcgagtgcctcccgctttccggcgtcggccctccagacagcgcctccctacgacgtgccttcgatgcctccctacggcgtgccaccaacgcctccggccgcgccctagcacccgccccgaggaccaccacctcgacgccttggtccccgctggctggcggatggggccctgcatccctcgtcaccgccttcagcaccatggcgatgaccccaccccctccgactgggtggttgattccgagcttcttaccacacaactcccactgcagacacgctctctttgtcccatcccatccattcctcccacccctcctggatcctcgttggcaacgataccactttgccggtcacctcaataggtgcctcggttttccctgggccgttctatctcaacgacgttctcgtagcccctcacataactcacaatcttctttctgttcgtcggttcaccaccgacaacttttgttccattgagtttgacccctctggttttctgtgaaggatctagccacatgacccctctcacccgctgtgacagcgccaagcccctctacacgcttcggccttccaccaccgacgcgtctccacctcccgtcctggtctccaccaccacctctaccacgtgacatcattgtctcggccacccaggacctgatgtcatgaccaaacttaacaacaatttagatccttcatgtagtaggggacattttgatggtctctgtcatgcttgtcagttagaccgacatactcgtctcccattcaccactttttggtttgaggagtcttttgacctggttcattgtgatctctgtacctcccctatactcaatctctttggttataaatactatttggtcattttggatgatttttcccattttctttggacctttcctcttcggttgaagtccgacacgttcaccaccctcacacacttcttcacctaggtctccactcagttccgtcgcccggtccgtgccctacagtgtgacagtggccgcgagttcgacaaccatgcctcccgttctttctttctcaccaacggcgtccagttgcgtctctcgtgcccctacacctctttccagaacggccgggccgaccgcataactctttctcaccatttgctgccttctcttccaggcgtctgtccctgccagctactggggtgaggccctacacaccgccacacaccttctcaactctcttccctcgaaggcggtgagccaccctactcccacttcgccctgtacgacacaaccccttcctacgaccaccttcgcgtgtttggctgtgcctgttatgctaacacttccgccatcgctcctcataagctatctccttgctccactcgctgtctcttccttggctagtcccctgaccacaaagggtattgctgtcttgacctcagctcgcaccgtatcatcatctctcgtcatgtcgtcttcgacgaagatgtgtttccttttgctggctcctcccacccaccgatctcgactccctacttgagtctgatccggttacccctctataagtagatggactctaactctcatcaagaggatgacactataagttcgggcaattttctgtttatttcctcaaacactacacaatgccatacccatctaagggttggagacatatttatagccctagaggttgcactaccacaccttctcacacacactacacaacatgattgtcctctagatgctaaagagactacaaaggacagtcaaaaagcgattgttgtcctctagatgctaaagagactacagaggacagtcaaaaagcgactgttgtcctctagatgctaaagagactacagaggacagtcaaaaagcgactgctgtcctctagatgctaaagagactacagagtacagtcaaaaaacgactgttgtcctctgatgctaaagagactacagaggacagtcaaaaaaacgactgttgtcctctagatgctcaagacttattccatcagcctccaccctaggcgtcccgccttgcgccgttgcctgtaccatgtgcggcctcgacgcctccactcgcgcctctaccggcgcggcgacgacaccgtctacctcctgctctacgtcgatgatattgtgccgacatgcaccgtcgacctcctacagcgcacgatcgtcggccctcagcggtagtttgcgacgaaggacctggggcccctccaccacttcctcggcatcaccgccgaacgctggtcccagggtctcttccttcaccagcgccagtacgccatcgacatcctggagcgggctggcatattcgactgcaagccctgctccacgcctgtcgacacttaggcgaagctctctgaggacggcggcccccggtcgccgacgcgacgtcttaccggagcctgaccggtgcgctccattacctgaccttctctaggcccgacatcgcctacaccatccagcaggtgtgcctgcatatgcacaccccgcgggagccccatctcaccgctcaagcggatcctgtgctacctccgcggctacctcgactacgacctccttctccgaccatccccgacgtcggagctcgtggtctacaccgacgctgactgggccgattgtcccgacacgcgccggtccacttccagttctgccgtgttcctgggcgccaacctcgtctcctgggctgccatgcggcagctcgtcgtctcccgctccagcgccgaggtcgagtattgcgctgtggccaatggtgtggcagaggcctcctagatgcgccagctactacacgagctccacatctctcttcagcgcacaaccctcgtctcttgcggcaatgtcagtgcggtctacctctccaccaaccccgtgcatcatcagagcacgaagcatgtggagatcgacctgcagttcgtccgcgagcgtgtcactgcctgtgacgttcgggttctcagcgtccccaccacgctgcaatacgacgacatcttcaccaaggggttaccgtcgagtgtatttttagactctcgatctagtctcaacatctgatctgtacaagatagagttgcgggggggggggggggnnnnnnnnnngcagattttaaaataaaggtgcacagatttgcttcagctctcttcgcagcctctgtgtgttcggtggttggtaatggggcaaacactctcttctggacagataaatggcttcagggccaatctttgctccagattgcccccgcgctaataaatcgggtgcccgcgaatataagacggcgcagatctgtccaagcagccttaacagccaatggttgggtgcatgatatctctggaagccttacggcgcaggtgctgtttgaatttttattggtttgggatttactccaagaggtgcaactgtaccctaatgtggaggatcaacatcggtggttgccatcctcctcggggctgtattccgccagctctgcttatttgcgcttccatggtggtgcaacaacctttgagcctgctacaagaatctggaagacttgggcccccccgcgctgcaagtatttcatttggcttgcatctctcaaccgatgttggacggctgatcgactggcacgtcatggaatggatcatccagatagttgtcccttgtgtgatcagcaggatgagtcagtgcatcacttgctggtggattgtgtttttacgagggaagtttggtttacaacactaagcaggctaggtttgcaacatcttgctcccacgtctgatgctacannnnnnnnnngggggggggggggtgttagaattccatttacggtttggggttctcctcgtgtaattactctctcacccctgtgtaatgggccatgtcctgttaactcatgtctattaatacatcacccaaccccaagatagagttagggtttcccacactgtgtaatggactaggcctaacaacctgggtctattaatacaactcccaaccctgagttagggttaggttttcccacatgtaatagaggtaggttagtttctctcccccaccccatcccaaccgcccgcttctttcccagcctccggtcgccgtcagctgcatgctctagccgttgtccgccgtgtgctcctccctgtcgtcacatcctgcagccgccgaccccgccatggatcctccccaatccgtccctcccctctccttcgcgctggatgctagcgcggacgccgggcttggtgcgacggcagccgacctcgacatgcgcgccaccgcggccctcgacgcatgcacctcgcccgcgcaccgccgcgaacgccgccgccgtgtacgccgccctaggcgtgaccccctcatcggctgatctgcacggcgccataggcgtgtgccctcccttcgctagctcgctctttccccatggctcgtcgacccgctgcgctcgctgttggcccccctacatcgacggcctcgggcccctccgcggcgcctctcctacgaccttcgctgcacaacagcgccaaggttctctgcctggcttcctcgccctcgctgctcctacatggaccgaggacgtcgcttcctcgtcaggctcctccccaacttcctcgacattggttatggatatcgccaccatccaggcggctgttgcggcctcctaggaccgtgagcgcgccacgactcttgccttggagcgcgagcgcgccatggtgccgacttgaccacccagatggccgtcgcgcaacgcctcctcctcggtcgcagtaccaccccttcaccggtggcccctgggactccccatgcccaagggcttgatgctgacaccatcattaccctccatgcttaggtcgccggggtccacaacattcggtccctcgtgtgtgttatgctggacctggcgtcctcccactaccctcggtgtcgcgcttaggtcatcctcacgcttcggtgatactcccttgttgaccatgtcctcgacgaccccgtcgttccgctgtcaccttcgtgggtacagatggacaacgtgatcctctcgtggctcaacgacaccatcaccatcgagctacaagacatcgtccgtgactaggcgaacaacgcgtaccaggcgtggctcgctctcgagggccagttcctcgggaatcgggaggctcgggcgctccatctcgacgtccagttccacctgttctctcagggggatctctctgtgggagagtactgccgccagatgaagggcatgacaaactctctccgcgacctcggcgagcccatcgccggccatatcttggtgctgaaccttctacatggcctcagcccccgctacggccacctgaaggctttcatcaagaggatcgtgccttttcccacctttcatgctgtgccgaacgagcttctcctcgagggccccgccgatcacatctacgccgcatgaagcacgtgcagcatcagcacacggagcacatggagatcgatctgcactttgtccgtgagcgggtcaccgccggtgacgttcgggttctcagcgtccccaccaagctgcagttcgccgacatcttcaccaaggggctgccgtcgagtgtcttcgccgacttccgatccagtctcaacatctgtacaagatagagactgcggggggggggggnnnnnnnnnnnnnnnnnnnnnnnnnnnnnnnnnnnnnnnnnnnnnnnnnnnnnnnnnnnnnnnnnnnnnnnnnnnnnnnnnnnnnnnnnnnnnnnnnnnnnnnnnnnnnnnnnnnnngggggggggtgttagagtactgttagggtttcggggcttgtccctgtgtaattacttgcataccctcagtgtaatgagcttggcccatatagcactcccaactcagttagggttagggtttcattctccaacagttttgttcattatgagcacattttttgtcgacttgatttgttaatagtaagttattctgtgaaggtgctaacttttgatctgtttgggtaatatgaatgatttatagttgcatacctattataattgacgctatgtaatcttaggctgctctttatcaaactgactttcgaccagttccactggaggaattcataaaagttggtaatcaaatatttgataaagacatgaacgttgttcgtgtccttcccaaagtagctgaccatggtggcaaggatccagatcatattgttgaattgtgtaatgaggtaaatctgttatttacattgcaggtcttagtttttctctgttaaacactacaattttgaagcaaattgaatattgtacttgtatttgttccaggttgttcttcagggccattctgtgcttttgttttgctccagtcgtaaaggctgcgaatcaactgcaaggcatgttgccaagttcttgaaactaccctctgttggaacaactgatgttagttcggagttttcagatgctgcagctgctattgaggccttgaggaggtgccctgctggattggatccaatattgggagaaacccttccttttggtgttgcatatcatcatgctggtcttacggtatggaagctatcttctatcttcataagatacacaaaatatcaaatatatatatatatatatttatttatttgaaatttgcactgctaaatatgtgctaagtggtgagagtggtctcactaagccaccaggtcgcgggttcaaagcaaccccttcacatttgcgggggaagggttgccttggttttatcccttccctagaacttactcacatggcctccgtcactgggtctgccctttacactgctaaatttaataaagtgatgccatttttacctaaccacagctgggcaaagggtggtaggaactgatctgccattacctgttctgattgatccaatgagcgtcatcgccttctgttctgtggcaggtcgaggagagggagattgtggaatcatgctaccgtaaaggccttgtccgtgttctgactgccacttcaactttagctgctggtgttaacttgcctgctagacgggttatattcaggcagcccaagataggtcgtgattttattgatgggactcgctatagacagatggctggtcgtgctggtcgaactggaatagacacaaaaggagaaagtgtaagctacaatatctttgttccactttattctattagagaatggttctgacatttcactagttctgttttaattgtgtttttaactttagcctaccccaactgcttgggagaaaagggctttgttgttgttgtctaataatctgacatttgaaatgcatgcagatacttgtatgcaggcctgaagaggtcaagagagttacaggtattattagaagcaattgccctcccttggagtcctgcctctcagaagataaaaatggaatgactcatgcaattatggaggttgttgctggtgggattgttcaaactgcaaatgatattcatcgttatgtgcggtgtacgctgcttaattccacaagaccttttgatgatgtcgtgaagtcagctcaagactcccttcgttggttatgccataaaagctttcttgagtggaaccatgagaccaagatatactccgctactccccttggtagagctgcttttggaagttcactcaaccctgaggaatcattggtagcatacttgtcttttgctccttcattattttattgcattgagaaagggcctctagctgagttggttaggtggtctgagtagcactccttaggttctaggtttgactttccgtgggagcgaatatcagcctgtggttacctcccatttgtctgtcccacaccaaagcacaggtctaaggtcctgtctagatcgtagtcgtttctcaaatgggctacggtgccgctgtgtatgggtggggcaggggttcgggggttttctcgacctgcgtgagaaggtcttcttaatataatacccgagggctgtcttatcccccgcaggtcgagttttttttttattttattgcattgtttaatcttgcatttttctgtttctgcactaggttgttcttgatgatctttcgagggcaagagaaggctttgttctggcatctgatttacatttagtttacttggtcacacccataaatgtagaccttgaacctgattgggaattatattacgagaaattcatgcaactttcttctcttgagcaggtatgcaagtcttcttttgtcctattgcacttgaaagttcatttatcaaactgtaaatagaatatccagaaattcgagttctatctgtactcattagaaaatagttgaaagtgaattccgaaaacatgattttagttgctgttgaactaaatgtgtgaagcaaaagtgaattcagaaaatgcaaatcaaatttgttacggttataatagtcataatattagtgtaatcttctagtctagggtttccctcatgtttctcatgtactcttatagtgcttattcatccaattcagtgcttgttaatggaatgtgtgaagtctatttcggtatttttacataaccatgaatcagactaaaacatgcatatgtttattgaactccttcgcactgtacttggttgcagtttactacatatgttatttgacctggttcataagatttttttaggagttgtcagttcttattagttttttgtaattcccatgttttctttggcccaacaagaaacagaacaactgacatgataccatgttttctgcagaacattaatcttttatcagtggtattatcattagtgccaaaatgtttataactgtatgccatgtctaccctactaaggcctaagactgtgtccaacactgttttgcactgttcacagagtggagccaaatgtgttcgcttgactttaatccgtaccggcttctattgtttctacagtatttttgtctgtatagattgcagctacagcagtccaaacagttggctttaatctgcagtagctacagacccttttggacttgcgcactgctcatgcgaaaagtggatgcgttactgttcatgtcgggtcctgggtttgttaagacagatattagattagatcgggttgacttgttggctatttctttaactctagaaaatagttaaggatcaaatctacacatctctattgggattgtatctactttgaattaagtaagaaatagatagttcaacagttcctatctggctatctacctccttaacactggctttctcgcatggccaacatgaagtatgcctgtgacaccgtatctttctgccatattggttgagaaatcaaaccattacttaaattatcaacttcagttcagttcatagaacacataatttcactcatttttttaatttctgtttgttttgttggtacaatgcagtcagtaggcaatcgggttggagtaattgaacccttcttgatgcacatggctcatggggcgtcgataccttttcgtgcaaggcctcagagaaacaccgggttaagtaacaagtctgcacaagctgctggaaatactcttgttagtgagcacacaatcagagtgtctaagcgcttttatgtggctttaatgttatcgaggcttgctcaggtataatctaagaactacttagacattgcatgttagttctatgtcaatgcatagtgctcaagatcgctagaaagcctaagtcgtgaaatgtaaaaaatagttcaatagagattagataatgaaggttgaaatgttctctcattatatatggctaattaaaatattagctcatgtcttatatttttgtagaatacacaagagagctatgtatcatttcattgagaagggtataaataaataagttacaacacacccaccacactcacacatatacacatacaaacttgtactggaaacaattcacaacacacccaacatgccttttgcatcagaacaagacccttgggtgggcatttggggaactaaaaatttgtgggtactagaaattgctacccaatttcgagtttcgacctcgaaaaagcattagccaaaattttagatacttgataatttgagttccagttttacttggtgtacctgataattccagtagcattttaaagtaagaaacaaaagtccatcaaatcatttcatatcaattaacaagaaatcaattatcaagatagtacaaatctacattgagccataccaaataatagatttacactatactgaaccactccatatcttcatattagaaaatagaagaacaaaatttttgagatattttgcgtaattcgggtataaatttacccaaactacctgaatggaattcagttttctatagctactattacgaagatggtttccatggtgacctgctagatgggctatatgggcgactcagtttgtgggaatcttatccaaggtatcaaaggtgggacgacaaccactcgaccagccgtgtttccacctgtgaattccttcacgatatgcctgccatctatggctatggcctcgcgccacctcccttttatcaaaccacgcgagcaacgtccctcccatcgggttttcaatgtttatactcgtttgtcaaaaaggaaaatgctctcttgctcagtttcttggcaacatggactttcaagaaaattttcagacacctttttggctctttctatggaagccaccgaagaatacctcaagttctatgatacaattatttcagttcaaaacaacatgcaaggcaaggataaatggatctattcttggggaaacaacaatctacgttcaagcaagatttacatattaaacttacaatccatgtacccaccttctcctttcaagtggatctagaaatccaaagtgagtaaaaagatcaaggtgctcatttggctgaccttcagagacagaatcaactcaagaaattttcttcgaagaaagatgtgtacaattacaaatgatgattacaaccatgttctttgtggccttaattgtgaggaaaccacatatcatcttttatttgaatgtccattcagtacattgtgctggaatcatgttggtattcactgggatcaccctttggatttttttgaaatgaccatatctgcgagggatcaattcagtaaaaatttcttcatggaaattctggctgttacgacctgggagattttggaagcaaagaaatgctgctatcttcatagattcctttccatcttttacgtcttggaggttttgcttcaatgacacgttggggctacaaatgcatagaatgaactcgaatcttagcttgtcgatttccttgtggcttgcttctttattttctttacttctatctccatttgcttctattcttccttccctttactgtacatttccttttttatttaatatataccactgtatgggccttccctacagtttcatcggtcaaaaaatgtccctccaatgccctccctactgccacagtctaccatgccacaggttgttgcagcactaccatgcgctcccaccatatcttgcccaatttcatgtgtatttacaagaatttactggtataagttgctgagaaagtttgggttacacagtttgacccctgagccaggacatacatccttcctagactggtgggaggagtcttctgaagaagttcatgggatggttaagaaaggtctgaactcccttatcatcttgggggcctgaatgatttggaaccattgaaaccgatgtgtctttgatggactgacttctagtctttcctcgatccttgtgtagactgatgatgagagaagggcaactttggttaaagctgtgctcactgctattcccatttatcatctaattgctttgcaatgtccaaggtgggtaatcaaggcaatagacaagattcgcaggggttttctttggaaaggaagaactgacattagaggaggacattgtgtcgttgggtggtccaaggtctgtcgtcccctctctcttggtgggttgggaattcacaatttggaagtnnnnnnnnnnnnnnnnnnnnnnnnnnnnnnnnnnnnnnnnnnnnnnnnnnnnnnnnnnnnnnnnnnnnnnnnnnnnnnnnnnnnnnnnnnnnnnnnnnnnggcccccccgcgctgcaagtatttcatttggcttgcatctctcaaccgatgttggacggctgatcgactggcacgtcatggaatggatcatccagatagttgtcccttgtgtgatcagcaggatgagtcagtgcatcacttgctggtggattgtgtttttacgagggaagtttggtttacaacactaagcaggctaggtttgcaacatcttgctcccacgtctgatgctacaaggtttcaagattggtggagtgaggcagaaagacaagtgtctaagcataagaaaaaaggtttcaactctattgtaattttagtagcttggcagatttggaagcatagaaatgcgtgtgtgtttgacaatgcttccccaaacattcacgcaattttgctgtccatccatgatgaggctttattatggggtcttggaggggctgctgctcttaggcaggtttggttgtagtttgatttttggttttttaattttcgggggtgctttcttggcacctttgtactgggtcttttctagacccttttttcttatcttcttaatatatattgatgcgtggttctcccacgtgttcgagaaaaaaagatgatgagagaagaatatgggaattagctggggccaggggtctttccttcttggcaacacctcttcttgaggtctaacccccctggctctttagtgggtagtgtgagtgtttttacatggatcctttcatttatgcgtgctgttggcctctatagggaggttttttcttgtaacccaggtcttctttagaccttcctttccctaatatatttaaagcttagttcccctgcgcttcctagaaaaaaatatctcgcccaattctcatgcaccaaattcagttcccaacatcgtcttggctgattctaggatggtttgacacattatcgctggccttggtggactacattgccgctgcccatgcagtgtcgtgcttccacaagcttgaatttcattcatacgaatgattgacgtagtgtgagtagttcttccatggctaacacaccttggaggtcgacaagtcgtatcacctattcgaacatgacacgagcacactatcgtggatcgaattcaaggacctttgcaacttgtgtttttggcccccaattcgcaacaaccgcgttgacacattggctcgtcttcgattcttgaccaagatgcaagaataccaagatcatgtcatgccaacaagcgaagttgttcgctatgggatttccaaaatatatcaatcttgacatgaaattgtgggagccccaaaatcttcatataaaatcttcatataatcctatcatgatggcacacactgaacaaccatgaccctagtgtgcgttgtggcacactgaccaaccatgaccctaatgcacaatcagcactgatgctgaactccaacgaggaccactccaatgacaagcacatggacgagcaacaactctagcgttgcacctactctgtctattaacatcaatcgagttgtctaatcatcggaaacaagggttttgtcataattgtgatgagcaatacattcatggccatcactacaagtgactcttctacactgacgttgtcaactatcaggattatattaggtggctatgttgttgtcctcagtgtggccttcctgcgcatacttgcctcgtgttctagcggtaccagtgccacgtcttatgaaggggcattaggtctacatgcgcaagaagtctagctatggttaacgactccgtcaacaccacaaactctaggttcatggaccatctcctcaacatataagttgatctttttgctgaaacaagaggactttatcggcttggcgctgccaccactgcatgcacctgctactaaggacaactctagtagatgtcaatccatacatatacccacaactctagaagaataagctccatgctcgagaacaacatccaactgagtacattagcattgttgggccttgatgcttctcatcaagaaggttggcaactcatggaggttctgctttgactacagtgtgttgaattggaagacagtgaaggataaattttcgatcctgatggtcagtgagctactcgatgagccacccaaaattctttatctagctcgacctttggtcaggctaccaccaagtccacatctaccctgacaatgcgaaatgatgtttcttacacatcatggccacttcaagtttcttgtgataccgatgagcatcgccatcgcactagccacattcaacaacctcatgagcgacatgcttcgatagttgctttgctggctcgtccttgtattttttgatgtcatcctgttatagaacatttcttggatggagcatttgcaacatgtcaaggtggtgtttgatgtgctatgtgcgaacaagttgttcatcaagtggtccaaatgccacttcggtgtgttgttcgtctcctaccttgaccatgtgatctcggtgtatggcgtggctgtggatggcgaaaaggtggaagttgtggcatcgtggccacaactgtgatccactagggaactctgttgattccaagtatcgcgggtattacaagaagtttaacaaggactttggggtcatcgtagcacctctcatgaagctcttgaatgagggtttaggtggtgccaagaagcagaagatgccatgcaggggactcaatgggctgctatcaaccgcacctatactgcagttgttggcatttgacaagctgttcacggtagactgtgatgcgtcgagttgagtgcactaaggcgccagagcattgtcattctttagtgtaggtccttcgtagctcgacatctcaaggtggtagcctacgtgtgtgatacgattggcatggtgtaggcggtacaacgttggaggcatgggcttggtgcaggcggtacaacattggagtccctacttatggggttgaagccgatatggcattggagtccctagttacggggcaccattttctgcgcttaaagttcctgctcgatcaaatacttatcaaccccaacatcaatggatcaacatgctctttgactttgatttggttgaagtgtataagtggattgcctagcttctcccatcagcttaagcttttgggttgaactggttagtgtgtccactctaacatggtatcaaagccagaggtctcgagttcgaatcctgacagagacttaatttgtgcctccacccatttatttccacgtttgcgcgtttctctttgtctgcgtttgcgcctttctctctggctacacgtgagtggggggtggtgaagtgtataagtggattgattaccttctcccattagcctaagcttttgggttgaactggttagtgcgtccactctaacatggtaacagaaccagaggtctcgagtttgaatcctggcagaggctttatttgtgtctctacccatttatttctgcgtttgctccttttccatcagcttaagttttttgcgtccactctaacatatttcatagtgaagttttgggcaagcggaacacacttgctgacaccttgtccaatctcctattgtgacattgagactgtaggcactctcaagaccctcgttctagctctataacgacatttgccacgaggtccagacacagtgagttgggcgatccttggcggatacacgatgtcctcatcctccacgacaactagatcttcctagacacatcctctagcttgttgttcacttctttggagatcgcacaagacaagtgtccataaaaacgctcaagtgcctccaagtggacttttatattgctcgaggccgcaaggtggtctgttattttgtgaaagccttttcacatgctagaggaacaaaatagaaactcttcacctgtcgggactgctctagccattgctggtgatgttgaaggtttggaagggtgactcccttgacttcatggaaggccttccaagggtgcacgagaagtgtgatcctcacagtcaccgaccatttttctaagtatgcacatttcattgccctcgttcaccacctatagattgtggcatcggttgtgaaggcgtcattcgatggtttttatggcttttctagcatccattgtaagcgaccaggaccccgtgaaaggtaacttttggctggacctcttcaagatggctggtgtgagcttcgtataagcatagctttccatctacaaactttttttttcctcgaacagcgcaggagaactgcgcgtcatttcatttaaggaagaaagtaagtacaaaggtcaagagtgacccgaaacacaaacaccaacacacacacgccatccctcaaatacaaccgtcgcgccacatcaatgaagaaggcgaccacaacctacagggctaaaaaagcaccagtaggcaccgacccaaaaacaagttcctggagtttggaagctccagccaaacaccacagccccccttccacattaacagcttttagcacttcctcaacacatggcctagaattgtcaaagacacacctgctgcggtgcttccaaatctcccaagccactaacataattagtgaattgaggcctctacgaagccccttaggaacagcagcaacagttctcttccaccaacctgggaaccgagacactagaggtggtgaatagaactattgcaatgtacttgcagtgcatcacgggagataggtcgtgcacatggctggaatgactgccatgggaagagtattgatacaatacatccttccaaatcacgctcgaagataggcgccactgcccttggtcccattcacagtgcgcaccacgcgaactcaagcagtgcagatggcgctttaggagcgtgaccggtttttggcagagctctatgaatgactggttcaagcccaatatcacgggaaacgctaatacaataagcaccatcgcaaactagagttcgagatcggctcttgggtgtggccatgaacaggttgctgaaaagtgtctctgataccaaagatgatttgtctggattgttggctttattgatacaatgacaaggaaatcatcctgaccgccctccctaggaggctctggtcataataactcacttcttgctaaacccgtaatcaacattaggtttacagataaataggcttagaggttagctgttagagaaaggtatatgctgttgcaaaagatgatgtcttgcattgagctcttagatgatttatacagagtacatggcgtaggaggtaagacaacccatggatacatatggcagtctatgaagtataatatctagactatcaaatatactctaacacatgtggcagtctactagacaatatctagactaccaaatatactctaacactaaccactcccctagaatttctcttttttcctattgttcctcctagacttccaactaagctccatgcagacaactacggaaaaactcaacaaacttgacaactaattaggcgtggctgttagccacatggtgttgtggacgctggcttgttcttcttgtggcgagtatagacttgctgataagcgtccacaacaggttgttcgtgactgctggtgtgttaactctactatgaaaatatctatgtgcagtatgaagaagctaagctatttggttcagaactgaacctgtattcagtcttagcaactctactcatcaccctcctctagttgcaacccaatagagtatttctgatatgtctttcatatcatatgcattttgtacaagcagattagattatgtccaagttgtgtattgtaatgattttaatgtaagtttgtcttgtaatatagtctttaggaattgttccttgtggtattatttattatctgtttcttcttgtcttttgtttgtttatcttttattccaagttggggtgttcccatcttgtttccttgaaaagattgtactgttctcatgtaatgcttctttcaggagattcctattgctgatgtttgtgagacatttaaggtcgccagaggtatgattcaggcactgcaggaaaatgctggcaggtttgcttcaatggtttctgcattttgtcaaaggcttggttggaatgatttagaaggccttgtttcgaaattccaaaatcgtgtctcttttggagttagggcagagattgcagaactgacatcaattccatttgtcaaggtgtgctttaattaccatgcatatatgaattatctaagtgtctctggatcttatttcagtatggtcatgtaaaatatgaaatagggttcacgtgcaagggctttgtacaagtctggtctgcgtactcctgttgccattgctgaagcatctattcctgaaattgcaaaagctctttttgaatcttctgcttggtctgggcaaggtactctttcacgtattcatggtctgattccttactactcttttttatagtacttgttttgatgaggatataaatactatagctgaaatcctgtcctgtacagtcaaggattttccttgtacttatcttgggctacctctcacaattggcaaacccacaaaggaggtcttgctgccataattgaaaaggtggcagaatttttgctgggatggaaggcttctttaatgaactgtgcaggcagattggtaatggttcgagtagtgttaactgctgctcctatttaccttttgattgccatggatctaccaaagtgggttctaaaagccatcgacaaaaggaggggtctcctctggaagggccaggaacaagctaagggaggtcactgtttggtctcttgggaaagggtgcaacagcctctggaatatggtggtcttggaattcataatctggatctgcttggctgcgcgttgcagattcgctggttgtgggctgagaaaactgatcctagtaggctttgggcaggcctccccgctcaagtccctcgcaatgcttaggccctcttcaacattgcagtggacatcattgttgggaacggtgagcaaacactcttctggacagacagatggctggatggccataccatatctgaagtggcacccagcttatttagtgctgtctcgaagcggacagccaagaggaggacggtagcccaagctctccaaaaccaaaggtgggtggatgacatcaaaggagcactcacagtccaggttatattcgagtatctaaagattgtcgcatggtggatggtctgtttttgcagcaagatgtgccggaccaattttgtgtggaaattaacacaatccgacatttacacagcatatagtgcttatttcattggcaccatcaaatttgggccatggagaagaatatggaacagttgggcacctcctcgctgtaagtttttcatttggctggtgttccataaccggtgttggacggttgatcgccttgctaagagaggcttgccccaccctgatgcgtgccagctctgtgatcaagatgatgaagacattcaccatctcttggcctgctgtgtttttgctagacaagtatgagcaagcatctttcttcagtcgggccatactgccttggcgccatatgcttcaacaatctgtttttcaaaatggtggtggacagtaatctcaactgttcctaagaaaatgcggaagggtctaaattctttgatcattttggtcgcttgggaactgtggaatcattgtaatgcttgcttgtttgagcaacataggcccaatgttcaggaagttcttagggctgttagggatgaaggtagtctctagtgcagcgctggagcaaaaaagctccaagagctaatggtcacggtgttcagtctgggggattaggagcttgttgaggttcctttccctggccgcctttcttttttctcttctgtttgggttttagcgtctccagggtgggaggcgtgatgtacagtgggtgtgggtgaggtgttcttgtatttatttttggcattcctgcctttcttctaccttaatgaaatgttgcgcagctctcttgcgttgttcgagaaaagaaaagatgcacaaattggtttctcagttacttctggatatattcagtaataagcttgcagatactttattgtttgttttaagcctactctaatgtcaatctgttgaattgactaggtgattctggtttacgacgaatgcaatttggtgtagcaaaaaaaataaaaaatggagcccgcaaaattgtcctggaggaggcagaagccgccagagtagcagcattctcagctttcaagtcacttggtgtggaagttccccagttcactgcacctccactcgcagctattgaggaatatccaactcacgataccatagaccaagctaagttaaataagctagcttctggtacccattctagagatgataaaaatatgaatacttgctctgattatgctactccaagggcttctacatacagtctaagaaaggacacaagtcctgctccttccattcaaatgaaagagaatgcaggactatctaaaaatgtgcaaatcactagacagggagcatcatcatctttgtcaacagaaattgctgatggatctagtagagatgtggctgaaaaaggtcctgtccatgcatataacttcccagggggatttgattgttttcttgatcaatggtccacagctagtaattttttctttgatgttcattttatcaagagatcgatgaaaccatctttgaacctttttgaagtttttgggttggctgtctgttgggaaaaatctcccatatactactgcaacttcccaaaagatctagtcactactggcaacaataacatcaaggaaatgtggggtaattttcagagaagatgggaaaaaatagcggacattatgaaacaaaagagtgtccaaaaaatgacatggaatttaaagatccagatccaggcacttaaatcaccttatatttcttgccaacggcttgaaaggtttcatcttgaccataaaatgctggacaaagttgaagtgcttaacaactcatatatgttgttatcaccagtctctgtctacaatggattggatatatgtctgctggcgtgggttctatggccagatgaggaaagcagagcggttccaaatcttgagaaggtatttgatatatgtcgtgttctgcaatatctttagcttttcgttgctgatgcattgtcacttcatgtacattttttatattcgtttttttctgaactttgcaaaagcaatatgagtaggaattttagttgataagagcctcaagaaccgtgtgttggatatgaaaatgcaaggaaataggattattcatatagggcatgatgagaatgctaagagactttttaggaagacttagatgtcatgtttacaactatacctatcagtaagaaacttttcataggagatctcaatgggcatgtaagtacaacaagtgtaggttttgaggtgtttcatagaggcttccccaagcttcacgtctcagacaatgtttcttgaccaagtgggtttggctatgacatgaagctaagaaacattgtctggtcatgtccactttggagcgtaccgctcgtttacgctctcgaatctgcttccttaaagatggtgataccaattccatagctatgttttctggtcgcccgaccagctagtcgaactgggggatcgaccagcgactaatctcgattagtcgtcgactaggtccgactaatcgagctctggtcgacctggtcgtcctgttcatccaggagaccaggacctatgtatatactatataatatatactattatactatatagtaaataattatataactatatagtatatatgaacttcatatactatattatgaaggatagggtaaacatgacatgaattcagcaatactgaaaagtgaaaacagcatagaaacacttctagttattaatactacaagtcccagataccagtaccacacaacacacattaatactacaagtccaaaaaaaaatctaggtcctaaacctagtcgcccagaaccggctaatcgagcgactaatcggccctaatcgtcgactagtcggacgaccagggcgaccaggtactctagtcgagtcgactgcctaatcgagctctgctaaccgactagcccgactaatcgcgactaatcgcgattagtcggacgacttgaaaacacagttccataggcatgccagtttccggaaacaaaagaactttattgggaagttggtggttgatgatcagattttcacctcgcaagatgagaaacagaagcttgatggtatcttaattgcggatgcaagaggagacttatctttcagttatatcttttggtcgaacaatgtgcttgacaagtggagtatagtggtactaatctacacgagtaagggaaatatttaaagttgtatcaattaccaagtaattaagttgatgaaccatactatgaagctatgtgagagagttatcgagcattgtttgagaggaataatgaggatctctatgaaccaatttggtttcatgtccgaaaggtcaaccatggaagttattttcttaataagacaagggatgaagcagacagggagcagaaggacctacacatggttttgttgacttggagaagacttatgacaatatactaagaaatgtcatgtgttggtttttggacaaacataaaatctcaaggaagtatgttgtagtcattaaagacatgtgttcgaacaagggatggagacacaaataacttttcgattagaatatgactacatcaagggctggctttgagcccttatctttttgccttggcgatggatgaggtcacaagagacatacaaggggataccccttggtgtatggtttttgcgcacaatgtaatgctagttgatgaaagccgagcaagagtaaatagaaaactagagttgtgatggaagactctagagtctaaaggtttagactcaatagaacttaaactagagtatatgagatatgacttcgacactactgcacatgactacatacggaaagagatcttagtttggaagtttaagtagtgcttaggaaggatatcttttagtatttagaatcaatgctatagaatgacagggtattgatgaaaatgttagccatagaatcaaagtagggtggatgaagtagtgtcaaccatatgatgttctatgtgacaagagtgtaccacagatgctaaaagacaagttttaccaaacgatgattatacctgctatgtagtatggtgtagaatgttggcctataaaaacacattttcaatagacaagaagggattgagttcgaatcatggaatggtgatacacatgataagctaggggtagcaccaattgaagaaaatcttgtctaacacctgttgagatggtttgtaccatggtttttaaagcggtaaggcgctccaaggcgttggaccaccgcctagacgcctaggcggcgcctaggcgacgcctaggcgaggtaggcgggcaaggcgcctaggcgtcagaccaccgcccggacgcctaggcgtcgcctaggcgacgcctaggcgacgccttaaaaacagtggtttgtacatgtccaacagagaactccattagcaccattgtgtagtgacgcgctaataatgggaagagagatggagaaaggctaaagttaatatggaaagaggcattaaaaggagtcaaagatttagtcttgaataagagtgcatggaaaatagctatccatgtgcctgaaacttgacttatggtttatgttgggtttcaacgctagcctatcctaacttgtttgggattaaaaggatttgttgtttcttgaatacgcaggaggtctgcgtatttttatattaagaagaaaaaaggggggggggaccccaaaacagaaacaacagttttacaaactcacaccaccattaacgcctaagacaactcctctaaaaggatttgttgttgtttgcaatagcaatacacagctgttaattttgatgctgacctatttctgataatatattacttttgcattttactttgtgataaacagtttgtcaagaggcgacttcatagtcaagaagccgctgctgcaaatcgcgatggaagatggagaaatcagatgcacaaagcagcacacaatggctgctgtagacgtgctgcacagacacgggctttgtatactgttctgaagaaattacttactcaaaatctttctgttttggttgaaacaatcgaggccccattggtacaacacctattcttacttaatactctctccagttataacaaaagtgtcattttgggttgcctgcagttaatttgtttatactttgatgctttggattgaatatctgaaaataacgcaactagattcttcctggaaagtagttcaaaatataacaactttgttatagtttcatacattttgtagcaatcgaatcatcctattagtacccatgttggtatccaaaattacacttgtgatcggaatacaatattgctgcttgtattatgcttggatatctcttatgcatttattttgacaggttaatgttcttgctgatatggagctttggggaattggcgctgacatggatgcttgtctccgtgcgaggcatattataacaaaaaagctgaaggaactagagaaagaagcttacagattggcaggcaagaatttctctctaaatgctactgctgatatcgcagacattctatatacacacctaaaattgccagttccaaaaggctgtgagaaagggaagctgcatcctagcactgacaagcagtctttggaccacctaaggtattttttcattttccttgttagttctgacatcaaacatgttatttctagttctttggaagtacttgtgtgccactttatgtccgtgcattatggatggaaaattttaaatgtgttagcatatctagtgtctagtcactgatggtctattggtagttttgtgtgagtaaaggtaaattattatgttgtcttgatcagagctagaaaagtgcttgtggaccaccggccacatgttattggcagttaatctctggacatgcttttagaatatcattgtgctaatatgcactctttttctgttttttttggagtcaattaacaggattaactcatttttcatccctaattaaatacacgcatgcatgttcaaataatatcttcaatttggaaaagcttatgccaaagagaagcacatgtatcactgctttactgtattttcagtatataggctgctgctgatgtccttattgtatgcactcggaagatcggtagcaaggcaacactacaacagccttgccaagctggtcttcctttcgtttgaaatctatggcactcttttgatttcacttggccccaaattttcctcgacataaaattgccgtggctttatagtttactataaaatccttatcaactggacataatgctctctttaggcttctattaattatcccagtaatgtaggagaatttaatttgaccattttgctaaaatatttttgaattcttctgtttcctcagggatcaacaccccattatcccattaattaaggaacacagaacattagcaaaactgttaaatggcacgttgtggtccatttgttcacgtgctcaattgtgcactcaatcacaaaggtacatcatacatggaaattggcttcagacgtcaactgccactggccgtttgtccatggaggagccaaatctgcaggtcctttagttgtaataaatgctttgcatgttttgtttggatttcagttattgagaaataacctactgacttaacctgttactatgtagtgtgttgagcatgtggtggaattcgatacagggaaaagcgataaagattactcaagcatgtcagttgatgatcatcataaaatcaatgcccgtgattttttcatacctaccaaggtttttctcatttcacttttatgtatttattaagttttccctttaattaggacagttgactattttcctgtaacaacgctttatttaatatcatgatttacttattttgtaggagaactggttattcataactgctgattactcacagattgagttgcgtttaatggctcacttttctaaagatcatatgttggttgaacttctaaagaaacctgatggtgacgtttttaccatgattgcttcaagatgggctgagaaagaagaggccttgatttcttccaaagagagagaaaacactaaaagattcatatatggcatcctttatggaatgggtgcaaactcccttgcagaacaacttcagtgcagcactgaggaagctgcacagaaaattcaaagctttaggagattttttcctggtgtttcctcatggttacatgaagttgtgttatcctgtcgccaaaaagggttagtctacttggtagcaatttctgtttagtctttctttttatataatattgctcctttgatttttgatgctaacattgaatgagctctgtgaaaaatatgttagtcttaacttttgtggtatttcatatctgaacttttgagatatttcatatttgagcatgtattatcatatctttcaatgttagtatgcgagctgcttctcataataatttaaggtgaatatgcttcatgataatttgattttatttgaatgttaagtttatacagtaaatgataaggattactgtcttttggtcatgttatttatataacgactacttaagatcagagctcctttatctgttgggttgacatatgcacttgtagcccatattgctcatgagattgtatatatattgtcgtatccactactagcggtcttacgaaaccccaaggttactaaagccatggattagagtttgggataactttcaaatgcactcatgattcaattttctttttacctggtttgtgccgatcagaattaatgtctgcgcccttcttcagtttgttgtggcctaacttgtgaaacccttgctatctcacaacttccatctgttagacaatttattttcttccctagttacgaggatttcttctctgattatgtgccagcagttgtttcctccgtacgtagctgtccttgattaggtgtggacaattggttccttcctccctggctgtttccttttagcgcccagatcatctccccgattattgtttccatgaaatcaggtggagcacgttctggtagaggcctattgttctcctgctatttagttgaatataagcaacatttcgcgctattatggcatcaagagattgttacgatcccgtgagaactcgcttttggtaatacttgcttgcccacgtcgcctccccgatgttgtgccgtcatgccacctagtgaccctctgcccgttttccggtgaccaacaacataccgaggatgcagccacataggagaaggcctgctagatccttatcgttgctgccgatgaggctgtcaaggccgtcactgccgcctaggatcatggccgcacaacccaggacgctctcgcgagggaacgctaggctgctaccggtctcaagcgtgctaaggccgctgctcgtgacgctgccttccctcctctcaacgacgaccctgatgatgacgccgacgctagtgaagacttcaattatgaggccgctaccgcctccaacctccacgtggaggccgtgggcgtacagaacctccatgcccttgtgcctgtggttctggacatcctctccacccactacagtcgctgcgggatctcgtcctcctcgccctcgagcggtatgccgtcgccgaccatgtcctcttcgacgccctatttgtgccatcctatcgacgcatggacatcgtcgtcttgtcatgggtgttgtgcacgctctccctgagtttgagttcgctcgcacccccggcggcacaacacaccacacctggatcgttgttgaggagcaattcctcggtaatcgtgaagctcgcgcccttcatcttgacgccaaattctatgtctttatgcatggtgacctctctgtcggtgactactgccacaagataaatgggatggctgacgctctcggtgatctcggagtggttgttcgtggccgcatcctcattctcaacgtgctacacagcttgaacgagaaattaaaccacatgaaggtccactttcatgcactccaagctgctaccttccttcgtctgcaacgacctcatcctcgaggagattgactacaacgcatcaacaccgccaccagcagccgcccttgttgctgtgcatggcctttcggtagctctgcttcccctagcgtcccctcttctgggggcttagctgcgcccctgtcccacccacggcgccctccggtagcatctccactggtgccgacagctattagtagctaccgtcgtcgttgcgacaacggtggcgttgaaggcaaggccatggttccctagcctttgatctacaactcgtggaccgagttagtcaccatgtggcctggccccacatgtgggccacaagaccgtggtggccaaacgccgcgcgcgcccatgcctcaggccacgcaacaacagttgacaacaacatgactagttcgtggtcatgtcgtttggcttgaggaatgcgttaacatcattctagtcccccttgagaattgaatagcactcctagctgacaccatggactcatcgcactcttcatgggttgcttggcctcacgggcttctaccgcttcttcatcaacaactacgacatcatcaccacaccatgaacatccctcaagcgtgttgccttccagtgtgctgatgtggcgactacatcctttgaggccttcaaggcggccctcacctatggactggtgctgcagttgttgagcatcacggcttcgtccatcatcgattgcgattcttcgggcattggttttggcgtgctcttgcccgatcgccttgtttagtctgtggatggagccccagcctaccaaacttgccacctaagagcgcgagctcattggccttgtgaaggctgtgcggcactagaggtcgtatgtctgggaccggccagtggagatagaagattgggtccctaatgatttctcccctactagaatactgcaacagaacctttgaatcttttagtcctgaacaagttgtgcaggctagtttcgaaatgcaacaagggaccacaatatcgatgatacagctaggcatacatcaaagaagtttctaattcgttatcactcctcagatttgttgagactttattaggccggcgacgtgttcttacaaaaataacggctggcaatagcaaagagaaagctaaagcacagaggcaagcagtaaattctatttgccaggtaatatagcattctcacatagttttagatggttgattttattgattatatgattaatatgcatgtgtttccagggttctgctgctgatattattaaggtggctatggttagagttcattcaataattactaacagaactagtgcaactgattccacagatgaagttacaaggaaattttcagaacttggtggccagtgtcaccttattttgcaggtgttttaagacttgcattgcatgatacttattttcttttgacttttgctcagtttggctctaaatatggatgaatgcaactatatatttttcatttgtaggtgcatgatgagttggtattagaagttgatccgtgcatggtagcacaggctggaaggttgttacagatatgtatggaagaagcagcttcactattgggtatcagttttaatctaaacttcgatagttatcttatgttcagtctttgggagcatcttgaaaaggtctttaaaatttacctgctaaactaatagttatgccaagtgaacaaaatgaataggaagttctatttctgccgttctccaatagttaggttcttaaaactaacaacctgggcaggagggtatggggggagcacgcaaaaactgcggaggaggaggcacaaatagtagatatgacnnnnnnnnnnnnnnnnnnnnnnnnnnnnnnnnnnnnnnnnnnnnnnnnnnnnnnnnnnnnnnnnnnnnnnnnnnnnnnnnnnnnnnnnnnnnnnnnnnnnnnnnnnnnnnnnnnnnnnnnnnnnnnnnnnnnnnnnnnnnnnnnnnnnnnnnnnnnnnnnnnnnnnnnnnnnnnnnnnnnnnnnnnnnnnnnnnnnnnnnnnnnnnnnnnnnnnnnnnnnnnnnnnnnnnnnnnnnnnnnnnnnnnnnnnnnnnnnnnnnnnnnnnnnnnnnnnnnnnnnnnnnnnnnnnnnnnnnnnnnnnnnnnnnnnnnnnnnnnnnnnnnnnnnnnnnnnnnnnnnnnnnnnnnnnnnnnnnnnnnnnnnnnnnnnnnnnnnnnnnnnnnnnnnnnnnnnnnnnnnnnnnnnnnnnnnnnnnnnnnnnnnnnnnnnnnnnnnnnnnnnnnnnncccccccccccccccaaaaaaaaaccaaaaaaagggagctgttctaagaagcccatggagatgctctaaccaaggtaaaactgaattggtgtttgcttttatttcagtacctttgcgcacaaagataaaggtgggaaaaacttggggttcactagaaccattctatcctgagccttgttgatgcaaatggttaatgtcagttggatgccaatgtttcacgacatgcaaggtcctggaagaaggctgaacaatttccaatatgccccacagggaccttggtaaatcctactcttttttatagaagattcaccccctgcagagttaatctcatgaggcctgctatttgccactatcgtttcttgttctgcattgtccatgtatttaactgatgcataccttgaaccatatatgaccatatatccgtgtgtggctttgctaatcttgtattttgaatttagtttacattttcatcttcacggtctctttgaaacttcaaatgaatcaggtgattctgtctggtgttcttcggtagaaccttcattgctatgtctacagtcttctgtcattgctgaccgtatgtgaaatcaacgcaacagcgaccagctccattactgaggatttgctatggactggtgattatcattatgattccatgtggcatgcaagaagcatatatatatatatcaccaatagatgctgttaaagggtttaaggtgtatttgaaaggtcttcctagttatactgcgaatcttttagataaacccttaagaaattggagggcctagtatatggtgatttttcttttgctaggtccagcgctaaaaaaccgattatggggtttattcaaagatgaaatttcatcctgtaactacaggttcaaggtgtatttggtttgatggatatcactatggacaagcgatggttggtttttgtacaagttggatgttgataaaaatgttggtatccatgccacacaaaaaaagcctaaccagcacccatattttgtaatccttgtcaagtatgttatatggtttacttgatagctctagcgaggctatccagtacctcaccttcaccctcatatttgtaatccttgtccacataattattagtatgttatatggttatttagtaattacgatggaaatatta

SEQ ID NO: 37 - DNA, 138 bp, Artificial Sequence
  marker ma61227s09
agaagcggagtgcgtcccagtcattcttggttccttgtgacaacgactatgtcaagaagyagcgagttgcccattgtggtggctttgaagctctaaaggttggatcaagatacactatccatccatctttagcatcgt

SEQ ID NO: 38 - DNA, 72885 bp, Artificial Sequence
  genomic DNA of mutant pol theta (c->t at position 702)
  misc_feature (5583)..(5733): n is a, c, g, or t
  misc_feature (31155)..(31650): n is a, c, g, or t
  misc_feature (44470)..(44479): n is a, c, g, or t
  misc_feature (45143)..(45152): n is a, c, g, or t
  misc_feature (46993)..(47109): n is a, c, g, or t
  misc_feature (53299)..(53398): n is a, c, g, or t
  misc_feature (71287)..(71733): n is a, c, g, or t
gcccagcaattcaaaagaaaccgaacacccttccggaaattccctctggcaatggcgtcgggctcgtctcgcccccaaatcgaccaggtaaaaccctaacctagttcctcgcctattcacttcgtcgcctccaagcgctaattcttcctgcgttccggctccatctcagttcttcccggccaagaagcggaggccctcgtcgcggaagggcgagtcgccgcgacccgggacgcagcatgagagccccggcggcgccaaggggtccctggaagggtacctcgtccgttcgccttgcaaccgtgccgtggcagcggcatcggtggtccccgtgggctcgcccaggggcggggacccgggcgccaggcgtagcctctcggccgcaatggatgtcgacgtcggttcctcggcttcggtggctgcggcggcaggtgacggggcagactttgatctcaggaggagcacggcggatttcttgtcccattcctgcaggtgagcgcgcacagtgtgaaacataaggggagttatagtattggttccaataactgttattttgcaagttacgggtctaattttgttgttccagtgctatcctgcctttgaggggtgactgtgattacagcgagcagtgccagatgaagcagaagcggagtgcgtcccagtcattcttggttccttgtgacaacgactatgtcaagaagcagtgagttgcccattgtggtggctttgaagctctaaaggttggatcaagatacactatccatccatctttagcatcgtcatatgataagtgatttcatgagtttcaactcttagtttggttctttgcaggagttagatgataatgtagcttccatgaagcaatgcatcaatcaccatggtggctcagaggctgtggaggtttagttatgcctgaacaagtcaaacctggaaccgtttctttgttttcctcttttccttttgaacttctcattatttccttttcatcaggaatctgttgagggggaacatgtgagttgtgttgggttttcggccttgcaaagatgtagctttaccccaagtactgcacagataaaagttgggttttctctagcacctgtggaaaccctaaagtctgtatcgaggaattcccttacttcacctggtgaggagttctggaatgcagcaattgaactcgctgatgggatatctgcccaggctgataaggtccgtggaaggccagaatttgatgcagcagaagacaagtcatcttgtgcagtagcagcattctttaagactcttcctagatcaggaagggatgagcttgactgtcaaaacacagtaggcagcaatgatacacatcatatagagaaattgtcaaataaagttgaatcactggcagtaaactgtcagcatataattagctcacctttgcctgtgaagcagctagatttctttcatgaggatgatattaaagtttcaggttcaaaatttgaaacaaaaggcagctatgaaacttgtaatgcacaagcagaccgtgttccactgaaaggcagtggccgcctagaaaaggaaaatctcatggaccctgtggatgtgatgaagagaagtgctattaatttgcacactgattctgcagccatgagatgtcagggtgttttcaagtcaacaactgaagggaaggttcatccaactcaagaggctggaagagattctaatcttattaggagagatctcaatcagccaacccacaatgaaaataaatcacttgctgcatattcaaataatcgcaagacttggatagattccaagagtaaagttgcttctcaggaagtggaagctagcacacctactagctccattcctctaaaggatcactcaaagatatcaagttggcttcctcctgacctttgtgctatatacatgaaaaaaggcatttcagagctgtacccttggcaggttaaggttcttttctctaattatctatttaatgaatctctggcagctagccttctttcgtctggccatttttgcctatgtatttttttctccagccatgcaaactaccactgccctctctactagtaggattaccaattatttttgctcgtaagctaagcttctttagtatttgtatcgtaataagtatgtcttgaaaactagtacttagtatatcaagtgctgagatggtttgtacatgtccaatagagaccttttagaggcaccagtgcatattagtattataaaacattaaaacgtgatagtaatgggaagaggtagggaaaggccaaacttgatatggaaagatgcaataaaaggagacttaaaatgatgaaatatatctaaagatttagtcttcaatatgattatgagtgcatggaaaacaactattcacgtgcctaaccttgatttgtggcttgtgttgggtttcaactctagtctacactcacttgcttggtactaaaaggctttgttgttattgttgattcatataaaatgctaagtcttctcttgtattgctgtcatcacattcttttcacgtttttaatgcgtttttgcttcatttttctcgaatattgtaatgctctcctagatctgtctgaaggcatgtttggtttgtgcccccactatgctaaaccaaatttggcaatagaagaaaccatgacatggccttttgtaacaccccgtccaatccctggaccggcggtacttactcctggtagctctctagaatcatatattgtccccacagaccaacacaagtcttttatgcgcactttgtcctcactcatgcgcacccgagaaaacttcccagtcggtcacccatcccaaattgctccaagccaagcacgcttaacttggaggttcttttgagataggcttcctaaaaagaagatgcaccttgttgatatggttactctattaattctattaagccttgggccaggatatcccatcccaggggccaggatatcacaattcaccccccttagaagaccgatgtcctcgtcggtcaaccccaatccaggaacctcccctcttagccacgtctgtgtgtctagtgtcgtcatatgccatgccatgtgaccactctgggcccacatgcgccatgcgccatatacccaaaccacctagcccacacacgcccgtgaaacatcgagggtcggctctgataccacttgtaacaccccgtccaatccttagaccggcggtacttactcctggtagctctctagaatcatatattgtccccacagaccaacacaagtcttttatgcgcactttgtcctcactcatgcgcacccgagaaaacttcccagtcggtcacccatcccaaattgctccaagccaaacacgcttaacttggaggttctttcgagatagacttcctaaaaagaagatacaccttgttgatatggttactctattaattctattaagccttgggccaggatatcccatcccaggggccaggatatcacacctttaggcaggtacaagatttgaattggattattggagccaaataaatttacataaatatctacctaactaaaaggaacaatgtttcttgttgccccttccacccaatgataggtggacccaaggtaatcctgcgtctcttatgtcaggtcagcactctctcgctaagagccatttgttcatgattgaatagccaagtgagatggccaccatcctcgaggtcatgttttcggacctaggatgtcaggccgaatgtgttctggttcttggagttgtattttgtttcttttaatataagccgttcggttgcataggccaaaagagcagtttgaggccaaatgaaattttagcggcgagagctgtctcactgagttgtgagtttgaagcagtctttccgcatttgcgcggggggggggtgatggaataagtcttgagcatctagaggacagcctgcttttgactgtcctctgtagtcctttagcatctagaggacaacagtcgctttttgactgtcctctgtagtctctttagcatctagaggacaacaatcgcttttgactgtcctctgtagtcgctttagcatctagaggacagcagtcgctttttgactgtcctctgtagtctctttagcatctagaggacaatcctgttgtgtagtgtgtgtgagaaggtgtggtagtgcagcccctagggctataaatatgtgtccccaacctctctaagggtatgacattgtgtagtgtttgaggaaataaacagaaaattgccccaactcatagtgtcatcctcttgatgagagttagagtccctctacttacaattggtatcagagccaaactatcctgcagcctaaacatatcgtgctcatctccttctcgcgtctctccccacactcagtcggcagcaagagctccaactgttccttcctcccctgctcagacgagcagcctttcgtctgagacagcctcttccacacgcagcaacccctcactagcccaccatgtccctacgctcggccacttcgagtgcgcggcgccagcaggaggccgaggtcgccgcggcacaagaacgcgagcgagcagcagcagcggctgcagcgacagcggcgagggcagcacggttggcggcggcggaactggcagcggcgagagcggaagtagaagcagcggaggcggcggatgctgcacgtgcggcggcaacagagctcgaggttctgcgcggcagtagagctggcagctctgcttctgtcgacgacaacaccgacgaagagctcaggctggcgagggaagcagcgcgagagcaggcggcatagtgggcagccgcgcatccccatgggggcgcgcgtggcggcagcccggatacgcgctgacggcgctctaggcggaggcgcacgcggcggcagcccagacgggcgtagacgcgccggcggtgctcccggcggcggcgaccgagtcgacggagatcgcggcctctacaggcggcgcggttctccctccccggatcggtaccatggtcgccgcatggcccaggccattgtcagggacatcggtcccggcggtggggggcctaccctcaccaagaccaactacgtcgagtgggccgcggtgatgagggtacggctccaggttcgccacatgtgggaagcagttcgttacgacgacgtcgactaccacgaggatcggcgggcgctggatgctctcattgctgtagtcccgcccgagatgcagttttcgctttcccagaagcggactgccaaggaggcctgggacgccatcgctgcgacccgcatcggcagcgatcgtgcccgcaagaccacactgcaggcacttcgcaaggagtgggagaacctggccttcaagccaggtgaggatgttgatgactttgctctccgcctcaacactctgttgcagaagatggtgcagttcggcgacgacacctacgatgaggagagagctgttgagaagctcttccgttgcatccccgagaagtacaggcagattgctcgctcgatcgagtctctgctagacctctccacgatgacgatcgaagaggcgattggtcgcctcaaggtggtggatggcgacgaaccacaggctctctctgggcctatcactatcggcgggnnnnnnnnnnnnnnnnnnnnnnnnnnnnnnnnnnnnnnnnnnnnnnnnnnnnnnnnnnnnnnnnnnnnnnnnnnnnnnnnnnnnnnnnnnnnnnnnnnnnnnnnnnnnnnnnnnnnnnnnnnnnnnnnnnnnnnnnnnnnnnnnnnnnnnncagggtgacaagaagaagggggagtcctcctcctcgacacgaggccgcaaacgcggcaagccgcgcaagccgcgtggaggcgcccaggccggggcgcgaggacatgctgagggtggtgcacgtggaggtgcccaaggcggcgccgtcggcaacaagaagccggcacgcgacgacggctgccacaactgcggcaagcttggccactgggccagggattgtcggcagccacgacgtggccaggccaacgtcgcacaagcagaggcggaggaggaggccctgctcctggcacatgcaagcatcgagccatctccagcggcaccggccgcagcggcactcctccaccttgatgagtcgaaagcacgcgctttcctcggcgacggctccaacaaggacatgatcgaaggatggtgcctcgacaccggcgccactcatcacatgaccggccgacgggagttcttcaccgagcttgactctagcgtccgaggctccgtcaagtttggggacgcctccggtgtagagatcaagggcgccggctcagtcgtcttcaccgccacgtctggtgagcacaggctgctcaccggagtctactacatccccgcgttgagaaactctatcatcagtttgggacagctggatgagaacggttcgcgcgtggaggtcgagcacggagtcatgaggatctgggatccctctcgtcgccttcttgccaaggtacgcaggagtgcaaatcggctttacatcctcaatgtgaaggtggcacaaccttgctgccttgctgctcgtcgagacgacggggcatggcagtggcacgagcgcttcgggcaccttaacttcgaagccttgaagcggctcagcgccaaggagatggtacgaggcctgccgtgccttgaccatgtggagcaattctgcgatgtctgcgtgttgacaaagtagagactgctccccttcccccagcagtcgagcttccgagccaaggagaggctcgagctcgtgcatggggacttgtgtggcccggtgacaccagccacaccaggaggacgacgctacttcttgctgctcgtcgacgatctctcccgctacatgtgggtgatgatccttggcagaaagggagaggctgcgaacgccatcaggcgtgtgcaggtcgctgcggaggcggagtgcggccgcaagctgtgatggaataagtcttgagcatctagaggacagcctgcttttgactgtcctctgtagtcctttagcatctagaggacagcttgactgtcctctgtagtctctttagcatctagaggacagcagtcgctttttgactgtcctctgtagtcgctttagcatctagaggacagcagtcgcttttgactgtcctctgtagtctctttagcatctagaggacaatcctgttgtatagtgtgtgtgagaaggtgtggtagtgcagcccctagggctataaatatgtgtccccaacccctctaagggtatggcattgtgtagtgtttgaggaaataaacagaaaattgccccaactcatagtgtcatcctcttgatgagagttagagtccctctacttacaattggtatcagagccaaactatcctgcagcctaaacatctcgtgttcatctccttcccgcgcctctccccacactcagtcggcagcaagagctccaactgttcctccctcccctgctcagacgagcagcctttcgtctgagacagcctcttccacacgcagcgacccctcactagcccgccatgtccctacgctcggccacttcgagtgcgcggcgccagcaggaggccgaggtcgccgcggcacaagaacgcgagcgagcagcagcagcggctgcagcgacagcgacgagggcagcacggttggcggcggcggaactggcagcggcgagagcggaagtagaagcagcggaggcggcggatgctgcacgtgcggcggcaacagagctcgaggttctgcgcggcagtagagctggcagctctgcttctgtcgacgacaacaccgacgacgagctcaggctggcgagggaagcagcgcgagagcaggcggcacagtgggcagccgcgcatccccatgggggcgcgcgtggcggcagcccggataggcgccgacacgctgacggcgctccaggcgggggcgcacgcggcggcagcccagacgggcgtagacgcgccgacggtgctcccggcggcggcgaccgagtcgacggagatcgcggcctctacaggcggcgcggttctccctccccggatcggtaccatggtcgtcgcatggcccaagccattgtcagggacatcggtcccgacggtgggtggcctaccctcaccaagaccaactacgtcgagtgggccgcggtgatgagggtacggctccaggttcgccacatgtgggaagcagttcgttacgacgacgtcgactaccacgaggatcggcgggcgctggatgctctcattgctgcagtcccgcccgagatgcagttttcgctttcccagaagcggactgccaaggaggcctgggacgccatcgctgcgacccgcatcggcagcgatcgtgcccgcaagaccacactgcaggcacttcgcaaggagtgggagaacctggctttcatgccaggtgaggatgttgatgactttgctctccgcctcaacactctgttgcagaagatggtgcagttcggcgacgacacctacgatgaggagagagctgttgagaagctcttccgttgcatccccgagaagtacaggcagattgctcgctcgatcgagtctctgctagacctctccacgatgacgatcgaagaggcgattggtcgcctcaaggtggtcgacggcgacgaaccacaggctctctctgggcctatcactatcggcgggaagctacatctcactcgggagcagtgggaggcctgccagggtgacaagaaggagtcctcctcgacacgaggccgcaaacgcggcaagccgcgcaaggcgcgtggaggcgcccaggccggggcgcgaggacatgctgagggtggtgcacgtggaggtgcccaaggcggcgccgtcggcaacaagaagccgacacgagacgacggctgccacaactgcggcaagcttggccactgggccagggattgtcggcagccacgacgtggccaggccaacgacgcacaggcggaggcggaggaggaggccctgctcctggcacatgcaagcatcgagccatctccagcggcaccggccgcagcggcactcctccaccttgatgagtcgaaagcacgcgctttcctcggcgacggctccaacaaggacatgatcgaaggatggtgcctcgacaccggcgccactcatcacatgaccggccgacgggagttcttcaccgagcttgactctagcgtccgaggctccgtcaagtttggggacgcctccggtgtagagatcaagggcgccggctcagtcgtcttcaccgccacgtctggtgagcacaggctgctcaccggagtctactacatccccgcgttgagaaactctatcatcagtttgggacagctggatgagaacggttcgcgcgtggaggtcgagcacggagtcatgaggatctgggatccctctcgtcgccttcttgccaaggtacgcaggagtgcaaatcggctttacatcctcaatgtgaaggtggcacaaccttgctgccttgctgctcgtcgagacgacggggcatggcagtggcacgagcgcttcgggcaccttaacttcgaagccttgaagcggctcagcgccaaggagatggtacgaggcctgccgtgccttgaccatgtggagcaattctgcgatgtctgcgtgttgacaaagtagagactgctccccttcccccagcagtcgagcttccgagccaaggagaggctcgagctcgtgcatggggacttgtgtggcccggtgacaccagccacaccaggaggacgacgctacttcttgctgctcgtcgacgatctctcccgctacatgtgggtgatgatccttggcagaaagggagaggctgcgaacgccatcaggcgtgtgcaggtcgctgcggaggcggagtgcggccgcaagctgtgatggaataagtcttgagcatctagaggacagcctgcttttgactgtcctctgtagtcctttagcatctagaggacagcttgactgtcctctgtagtctctttagcatctagaggacagcagtcgctttttgactgtcctctgtagtcgctttagcatctagaggacagcagtcgcttttgactgtcctctgtagtctctttagcatctagaggacaatcctgttgtatagtgtgtgtgagaaggtgtggtagtgcagcccctagggctataaatatgtgtccccaacccctctaagggtatggcattgtgtagtgtttgaggaaataaacagaaaattgccccaactcatagtgtcatcctcttgatgagagttagagtccctctacttacaattggtatcagagccaaactatcctgcagcctaaacatctcgtgttcatctccttcccgcgcctctccccacactcagtcggcagcaagagctccaactgttcctccctcccctgctcagacgagcagcctttcgtctgagacagcctcttccacacgcagcgacccctcactagcccgccatgtccctacgctcggccacttcgagtgcgcggcgccagcaggaggccgaggtcgccgcggcacaagaacgcgagcgagcagcagcagcggctgcagcgacagcgacgagggcagcacggttggcggcggcggaactggcagcggcgagagcggaagtagaagcagcggaggcggcggatgctgcacgtgcggcggcaacagagcttgaggttctgcgcggcagtagagctggcagctctgcttctgtcgacgacaacaccgacgaagagctcaggctggcgagggaagcagcgcgagagcaggcggcacagtgggcagtcgcgcatccccatgggggcgcgcgtggcggcagcccggataggcgtcgacacgctgacggcgctccaggcgggggcgcacgcggcggcagcccagacgggcgtagacgcgccggcggtgctcccggcggcggcgaccgagttgacggagatcgcggcctctacaggcggcgcggttctccctccccggatcggtaccatggtcgtcgcatggcccaagccattgtcagggacatcggtcccggcggtgggtggcctaccctcaccaagaccaactacgtcgagtgggccgtggtgatgagggtacggctccaggttcgccacatgtgggaagcagttcgttacgacgacgtcgactaccacgaggatcggcgggcgctggatgcccccattgctgcagtcccgcccgagatgcagttttcgctttcccagaagcggactgccaaggaggcctgggacgccatcgctgcgacccgcatcggcagcgatcgtgcccgcaagaccacactgcaggcacttcgcaaggagtgggagaacatgaccttcaagccaggtgaggatgttgatgactttgctctccgcctcaacactctgttgcagaagatggtgcagttcggcgacgacacctacgatgaggagagagctgttgagaagctcttccgttgcatccccgagaagtacaggcagattgctcgctcgatcgagtctctgctagacctctccacgatgacgatcgaagaggcgattggtcgcctcaaggtggtcgacggcgacgaaccacaggctctctctgggcctatccctatcggcgggaagctacatctcactcgggagcagtgggaggcctgccagggtgacaagaagcagggggagtcctcctcgacacgaggccgcaaacgcggcaagccgcgcaaggcgcgtggaggcgcccaggccggggcgcgaggacatgctgagggtggtgcacgtggaggtgcccaaggcggcgccgtcggcaacaagaagccggcacgagacgacggctgccacaactgcggcaagcttggccactgggccagggattgtcggcagctacgacgtggccaggccaacgtcgcacaggcggaggcggaggaggaggccctgctcctggcacatgcaagcatcgagccatctccagcggcaccggccgcagcggcactcctccaccttgatgagtcgaaagcacgcgctttcctcggcgacggctccaacaaggacatgatcgaaggatggtgcctcgacaccggcgccactcatcacatgaccggccgacgggagttcttcaccgagcttgactctagcgtccgaggctccgtcaagtttggggacgcctccggtgtagagatcaagggcgccggctcagtcgtcttcaccgccacgtctggtgagcacaggctgctcaccggagtctactacatccccgcgttgagaaactctatcatcagtttgggacagctggatgagaacggttcgcgcgtggaggtcgagcacggagtcatgaggatctgggatccctctcgtcgccttcttgccaaggtacgcaggagtgcaaatcggctttacatcctcaatgtgaaggtggcacaaccttgctgccttgctgctcgtcgagacgacggggcatggcagtggcacgagcgcttcgggcaccttaacttcgaagccttgaagcggctcagcgccaaggagatggtacgaggcctgccgtgccttgaccatgtggagcaattctgcgatgtctgcgtgttgacaaagtagagactgctccccttcccccagcagtcgagcttccgagccaaggagaggctcgagctcgtgcatggggacttgtgtggcccggtgacaccagccacaccaggaggacgacgctacttcttgctgctcgtcgacgatctctcccgctacatgtgggtgatgatccttggcagaaagggagaggctgcgaacgccatcaggcgtgtgcaggtcgctgcggaggcggagtgcggccgcaagctgtgatggaataagtcttgagcatctagaggacagcctgcttttgactgtcctctgtagtcctttagcatctagaggacagcttgactgtcctctgtagtctctttagcatctagaggacaacagtcgctttttgactgtcctctgtagtcgctttagcatctagaggacagcagtcgcttttgactgtcctctgtagtctctttagcatctagaggacaatcctgttgtatagtgtgtgtgagaaggtgtggtagtgcagcccctagggctataaatatgtgtccccaacccctctaagggtatggcattgtgtagtgtttgaagaaataaacagaaaattgccccaactcatagtgtcatcctctgatgagagttagagtccctctacttacaattggtatcagagccaaactatcctgcagcctaaacatctcgtgctcatctccttcccgtgcctctccccacactcagtcggtagcaagagctccaactgttccttcctcccctgctcaaacgagcagcctttcgtctgagacagcctcttccacacgcagcgacccctcactagcccaccatgtccctacgctcggccacttcgagtgcgcggcgccagcaggaggccgaggtcgccgcggcacaagaacgcgagcgagcagcagcagcggctgcagcgacagcggcgagggcagcacggttggcggcggcggaactggcagcggcgagagcggaagtagaagcagcggaggcggcggatgctgcacgtgcggcggcaacagagctcgaggttctgcgcggcagtagagctggcagctctgcttctgtcgacgacaacaccgacgacgagctcaggctggcgagggaagcagcgcgagagcaggcggcacagtgggcagccgcgcatccccatgggggcgcgcgtggcggcagcccggataggcgccgacacgctgacggcgctccaggcgggggcgcacgcggcggcagcccagacgggcgtagacgcgccggcggtgctctcggcggcggcgaccgagtcgacggagatcgcggcctctacaggcggcgcggttctccctccccggatcggtaccatggtcgtcgcatggcccaagccattgtcagggacatcggtcccgacggtgggtggcctaccctcaccaagaccaactacgtcgagtgggccgcggtgatgagggtacggctccaggttcgccacatgtgggaagcagttcgttacgacgacgtcgactaccacgaggatcggcgggcgctggatgctctcattgctgcagtcccgcccgagatgcagttttcgctttcccagaagcggactgccaagaaggcctgggacgccatcgctgcgacccgcatcggcagcgatcgtgcccgcaagaccacactgcagacacttcgcaaggagtgggagaacctggccttcaagccaggtgaggatgttgatgactttgctctctgcctcaacactctgttgcagaagatggtgcagttcggtgacgacacctacgatgaggagagagctgttgagaagctcttccgttgcatccccgagaagtacaggcagattgctcgctcgatcgagtctctgctagacctctccacgatgacgatcgaagaggcgattggtcgcctcaagggggtcgacggcgacgaaccacaggctctctctgggcctatcactatcggcgggaagctacatctcactcgggagcagtgggaggcctgccagggtgacaagaagcagggggagtcctcctcgacacgaggccgcaaacacggcaagccgcgcaaggcgcgtggaggcgcccaagccggggcgcgaggacatgctgagggtggtgcacgtggaggtgcccaaggcggcgccgtcggcaacaagaagccggcacgagacgacggctgccacaactgcggcaagcttggccactgggccagggattgtcggcagccacgacgtggccaggccaacgtcgcacaggcggaggcggaggaggaggccctgctcctggcacatgcaagcatcgagccatctccagcggcaccggccgcagcggcactcctccaccttgacgagtcgaaagcacgcgctttcctcggcgacggctccaacaaggacatgatcgaaggatggtgcctcgacaccggcgccactcatcacatgaccggccgacgagagttcttcaccgagcttgactctagcgtccgaggctccgtcaagtttggggacgcctccggcgtagagatcaagggcgccggctcagtcgtcttcaccgccgcgtctggtgagcacaggctgctcaccggagtctactacatccccgcgttgaggaactctatcatcagcttgggacagctggatgagaacggttcgcgcgtggaggtcgagcacggagtaatgaggatctgggatccctctcgtcgccttcttgccaaggtacgcaggagtgcaaatcggctttacatcctcaatgtgaaggtggcacaaccttgctgccttgctgctcgtcgagacgacggggcatggcagtggcacgagcgcttcgggcaccttaacttcgaagccctgaagcggctcagcgccaaggagatggtacgaggcctgccgtgccttgaccatgtggagcaattctgcgatgtctgcgtgttgacaaagcagagacgactccccttcccccagcagtcgagcttccgagccaaggagaggctcgagctcgtgcatggggacttgtgtggcccggtgaccccagccacaccaggaggacgacgctacttcttgctgctcgtcgacgatctctcccgctacatgtgggtgatgatccttggcagaaagggagaggctgcgaacgccatcaggcgtgtgcaggtcgctgcggaggcggagtgcggccgcaagctgtgatggaataagtcttgagcatctagaggacagcctgcttttgactgtcctctgtagtcctttagcatctagaggacagcttgactgtcctctgtagtctctttagcatctagaggacaatcctgttgtgtagtgtgtgtgagaaggtgtggtagtgcagcccctagggctataaatatgtgtccccaacccctctaagggtaatggcattgtgtagagtttgaggaaataaacagaaaattgccccaactcatagtgtcatcctcttgatgagagttagagtccctctacttacaattggtatcagagccaaactatcctgcagcctaaacatctcttgctcatctccttcccgcgcccctccccacactcagtcggcagcaagagctccaactgttccttcctcccctgctcagacgagcagcctttcgtctgagacagcctcttccacacgcagcgacccctcactagcccacgatgtccctacgctcggccacttcgagtgcgcggcgccagcaggaggccgaggtcgccgcggcacaagaacgcgagcgagcagcagcagcggctgcagcgacagcggcgagggcagcacggttggcggcggcggaactggcagcggcgagagcggaagtagaagcagcggaggcggcggatgctgcacgtgcggcggcaacagagctcgaggttctgcgcggcagtagagctggcagctctgcttctgtcgacgacaacaccgacgacgagctcaggctggcgagggaagcagcgcgagagcaggcggcacagtgggcagccgcacatccccatgggggcgcgcgtggcggcagcccggataggcgccgacacgctgacggcgctccaggcgggggcgcacgcggcggcagcccagacgggcgtagacgcgccggcggtgctcccggcggcggcgaccgagtcgacggagatcgcggcctctacaggcggcgcggttctccctccccggatcggtaccatggtcgtcgcatggcccaagccattgtcagggacatcggtcccggcggtgggtggcctaccctcaccaagaccaactacgtcgagtgggccgcggtgatgagggtacggctccaggttcgccacatgtgggaagcagttcgttacgacgacgtcgactcccacgaggatcggcgggcgctggatgctctcattgctgcagtcccgcccgagatgcagttttcgctttcccagaagcggacagccaaggaggcctgggacgccatcgctgcgacccgcatcggcagcgatcgtgcccgcaagaccacactgcaggcacttcgcaaggagtgggagaacctggccttcaagccaggtgaggatgttgatgactttgctctccgcctcaacactctgttgcagaagatggtgcagttcggcgacgacacctacgatgaggagagagctgttgagaagctcttccgttgcatccccgagaagtacaggcagattgctcgctcgatcgagtctctgctagacctctccacgatgacgatcgaagagtcgattggtcacctcaaggtggtcgacggcgacgaaccacaggctctctctgggcctatcactatcggcgggaagctacatctcactcgggagcagtgggaggcctgccagggtgacaagaagaagggggagtcctcctcgacacgaggccgcaaacgcggcaagccgcgcaaggcgcgtggaggcgcccaggccggcgcgcgaggacatgctgagggtggtgcacgtggaggtgcccaaggcggcgccgtcggcaacaagaagccggcacgagacgacggctgccacaactgcggcaagcttggccactgggccagggattgtcggcagccacgacgtggccaggccaatgtcgcacaggcggaggcggaggaggaggccctgctcctggcacatgcaagcatcgagccatctccagcggcaccggccgcagcggcactcctccaccttgatgagtcgaaagcacgcgctttcctcggcgacggctccaacaaggacatgatcgaaggatggtgcctcgacaccggcgccactcatcacatgaccggccgacgggagttcttcaccgagcttgactctagcgtccgaggctccgtcaagtttggggacgcctccggcgtagagatcaagggcgctggctcagtcgtcttcaccgccgcgtctggtgagcacaggctgctcaccggagtctactacatccccgcgttgaggaactctatcatcagcttgggacagctggatgagaacggttcacgcgtggaggtcgagcacggagtcatgaggatttgggatccctctcgtcgccttcttgccaaggtacgcaggagtctaaatcggctatacatcctcaatgtgaaggtggcacaaccttgttgtcttgctgctcgtcgagacgatggggcatggcagtggcacgagcgctttgggcaccttaacttcgaggccctgaagcggctcagtgccaaggagatggtacgaggcctgccgtgccttgaccatgtggagcaattctgcgatgtctgcgtgttgacaaagcagagatggctcccctttccccagcagtcgagcttccgagccaaggagaggcttgagctcgtgcatggggacttgtgtggcccggtgacaccagccacaccaggaggacgacgctacttcttgctgctcgtcgacgatctctcccgctacatgtgggtgatgatccttggcagcaagggagaggctgcgaacgccatcaggcgtgtgcaggtcactgcggaggcggagtgcggccgcaagctgcgcgtgctgcgcaccaacaacggcggcgaattcacgacggctgagttcgcgtcgtactgcgcggatgagggcgttcagcgccactactccgcgccgtacagcccgcagcagaacggcgtcgtcgagcggcgcaaccagacggttgtggggatggctcgggctctcctcaagcagagaggaatgccagctgtcttctggggagaggcggtggtgacagcgggttacatcctcaaccgctcgcccaccaaggctctcaacgggatgacaccgtacgaggcttggcatgggcgcaagccggcggtctctcacctacgggtcttcggctgcctcgcgttcaccaaggagcttggccacatcagcaagctcgacgataggagcaccccgggggtgttcattggctacgcggagggctcgaaggcctaccgcatctttgacccaagaacacagcgtgtgcgcacggcgcgcgacgtagtgttcgacgaagggcgaggttgggcgtgggacaaggcggtggacgacggcacgactccgacgtacgacttcaccatcgagtacgtccactttgagggagctgggggagtaggcaactcttctccgagcaggtctaccccagcccccaagtctccaccgcctccagcgccactctctccagctcctgctacaacgagctcttcaccaccacgcactccagccacgactccggctacagcgagctcttcgccaccacgtactccagcaccgacggtaccctctccgggaacgtcctctccgacaccagctcgtgtcgagcacgacccagtggagctcgtgacccctctgtcccgcgacgaggagcgcgtcgacgcgtgctacgccggcgagccgttgcggtatcgaagggtggagggccttctcatcgacccgtcggtgccaggccctgcatctcgcattctggcaggagagttgcatcttgcatgcgacgatggtgagcctcggtctttcgcggaggccgagcaacatgcggcttggcgtgccgcgatgcagtcggagatggacgcggttgagacgaaccgcacttgggagctcgctgatctccctcatggtcatcgcgcgatcacccttaagtgggtgttcaaactgaagagggatgaagccggcgccatcgtcaagcataaggctcgcttggtggcacgcggtttcttgcagcaggaggggatcgacttcgacgatgccttcgcccctgtagcacggatggaatccgtgcgactccttgcgctggcagccctggagggctggcatgttcatcacatggatgtcaagtcggcgtttcttaacggcgacttaaaggaggaggtctatgtacaccagccgccaggttttgcgatccctggcaaggagggcaaggtgttgcgcctgcgcaaggctctctacggcttgcgacaggcaccaagggcgtggaatgccaagctggattccacgctcaagaggatgggcttcatgccaagcccgcacgaggcggccatctatcgacggggcaatggagaaaatgccctgctggtgggtgtctacgtcgacgacttggtgatcaccggcgccaaggatgcagaggtggcagcgttcaaggaagagatgaaggccaccttccaaatgagtgacctggggcatctctccttctacctggggattgaggtgcaccagggagactccgggatcacacttcgccagaccgcctacgccaagcgcattgttgagctggctgggctcatcgactgcaacccagctctcactccgatggaggagaggctgaagctgagtcgcgacagcacgacgaaggaggtggatgctacacagtaccggcgtcttgtggggagccttcgctacctcgtccacacacggcctgacttggcatactccgtcggctacgttagtcggtttctgcagcgatcgacgacggagcatgagcaggctgtgaagaggatcatccgctatgttgcggggactctcgaccacggtctctactacccgaggtgccctggggaggcacaccttgtcgggtacagcgatagcgaccacgccggcgacatcgacaccagcaagagcacaagcgggatcctcttcttcctcggcaagtgccccatcagctggcagtcggtcaagcagcaggtggtggccatgtccagctgcgaggccgagtacatagcagcgtccactgcttcgactcaggctctctggctggctcgactgctcggtgatctcctcgggagagacactggagcggtggaactcagggtggacagccagtccgctctggcattggccaagaaccccgtgttccatgaacggagcaagcacatccggctgagataccacttcatccgagactgcttggcagaagggagcatcaaggcgtgctacatcaacaccaaggatcagcttgcagacctgctcaccaagccccttgggaagatcaagtttgttgagctttgctccaggtccgggatggcccaactttctcacaagacgacgcccaagacttagggggagaatgatggaataagtcttgagcatctagaggacagcctgcttttgactgtcctctgtagtctctttagcatctagaggacagcagtcgctttttgactgtcctctgtagtcgctttagcatctagaggacagcagtcgcttttgactgtcctctgtagtctctttagcatctagaggacaatcctgttgtatagtgtgtgtgagaaggtgtggtagtgcagcccctagggctataaatatgtgtccccaacccctctaagggtatggcattgtgtagtgtttgaggaaataaacagaaaattgccccaactcatagtgtcatcctcttgatgagagttagggtccctctacttacaagctgcgcgtgctgcgcaccgacaacggcggcgaattcacggcggctgagttcgcgtcgtactgcgcggatgagggcgttcagcgccactactccgcgccgtacagcccgcagcagaacggtgtcgtcgagcggcgcaaccagacggttgtggggatggctcgagctctcctcaagcagagaggaatgccagctgtcttctggggagaggcggtggtgacagcggtttacatcctcaaccgctcgcccaccaaggctctcaacgggatgacaccgtacgagacttggcatgggcgcaagccggcggtctctcacctacgggtcttcggctgcctcgcgttcaccaaggagcttggccacatcagcaagctcgacgataggagcaccccgggggtgttcattggctacgcggagggctcgaaggcctaccgcattcttgacccaagaacacagcgtgtgcgcacggcgcgcgacgtagtgttcgacgaagggcgaggatgggcgtgggacaaggcggtggacgacggcacgactccgacgtacgacttcaccatcgagtacgtccaatttgagggagctgggggagtaggcaactcttctccgagcaggtctaccccagcccccaagtctccaccaactccagcgccacactctctagctcctgctacaacgagctcttcaccaccacgcactccagccacgactccggctacagcgagctcttcgccaccacgtactccagcaccgacggtaccctctctgggaacgtcctctccgacaccagctcgtgtcgagcacgacccagtggagctcgtgacccctctgtcccgcgacgaggagcgcgtcgacgcgtgctacgccggcgagccgttgcggtatcgaagggtggagggccttctcatcgacccgtcggtgccaggccctgcatctcgcattctggcaggagagttgcatcttgcatgcgacgatggtgagcctcggtctttcgcggaggccgagcaacatgcggcttggcgtgccgcgatgcagtcggagatggacgcggttgagacgaaccgcacttgggagctcgctgatctccctcatggtcatcgcgcgatcacccttaagtgggtgttcaaactgaagagggatgaagccggcgccatcgtcaagcataaggctcgcttggtggcacgcggtttcttgcagcaggaggggatcgacttcgacgatgccttcgcccctgtagcacggatggaatccgtgcgactcctcctcgcgttggcagccctgaagggctggcatgttcatcacatggatgtcaagtcggcgtttcttaacggcgacttaaaggaggaggtctacgtacaccagccgccaggttttgcgatccctggcaaggagggcaaggtgttgcgtctgcgcaaggctctctacggcttgcgacaggcaccaagggcgtggaatgccaagctggattccacgctcaagaggatgggcttcatgccaagcccgcacgaggcggccatctatcggcggggcaatggaggaagtgccctgctggtgggtgtctacgtcgacgacttggtgatcaccggcgccaaggatgcagaggtggcagcattcaaggaagagatgaaggccaccttccaaatgagtgacccggggcacctctccttctacctggggattgaggtgcaccagggggactccgggatcacacttcgccagaccgcctacgccaagcgcattgttgagctggctgggctcaccgactgcaacccagctctcactccgatggaggagaggctgaagctgagtcgcgatagcacgacggaggaggtggacgctacacagtaccggcatcttgtggggagccttcgctacctcgtccacacacagcctgacttggcatactccgtcggctacgttagtcggtttctgcagcgaccgacgacggagcatgagcaggctgtgaagaggatcatccgctatgttgcggggactctcgaccacggtctctactacccgaggtgccctggggaggcacaccttgtcgggtacagcgatagcgaccatgccggcgacatcgacaccagcaagagcacaagcggaatcctcttcttcctcggcaagtgccccatcagctggcagtcggtcaagcagcaggtggtggccatgtccagctgcgaggtcgagtacatagcggcgtccactgcttcggctcagacgctctggctggctcgactgctcggtgatctcctcgggagagacactggagcggtggaactcagggtggacagccaatctgctctggcattggccaagaaccccgtgttccatgaacggagcaagcacatccggctgagataccacttcatccgagcctgcttggcagaagggagcatcaaggcgcgctacatcaacaccaaggatcagcttgcagacctgctcaccaagccccttggtaagatcaagtttgttgagctttgctacaggtccgggatggcccaactttctcacaagacgacgcccaagacttagggggagaatgatggaataagtcttgagcatctagaggacagcctgcttttgactgtcatctgtagtcctttagcatctagaggacagcttgactgtcctctgtagtctatttagcatctagaggacagcagtcgcttttttgactgtcctctgtagtcgctttagcatctagaggacaacagtcgcttttgactgtcctctgtagtcgctttagcatctagaggacaatcctgttgtgtagtgtgtgtgagaaggtgtggtagtgcagcccctagggctataaatatgtgtccccaacccctctaagggtatgccattgtgtagtgtttgaagaataaacagaaaattgccccaactcatagtgtcatcctcttgatgagagttagagtccctctacttacagagccatctccagcggcaccggccgcagcggcactcctccaccttgatgagtcgaaagcacgcgttttcctcggcgacggctccaacaaggacatgatcgaaggatggtgcctcgacaccggcgccactcatcacatgaccggccaacgggagttcttcaccgagcttgactctagcgtccgaggctccgtcaagtttggggacgcctccggcgtagagatcaagggcgccggctcagtcgtcttcaccgccgcgtctggtgagcacaggctgctcaccggagtctactacatccccgcgttgagtaactctatcatcagcttgggacagctggatgagaacggttcgcgcgtggaggtcgagcacggagtcatgaggatctgggatccctctcgtcgccttcttgccaaggtacgcaggagtccaaatcggctatacatcctcaatgtgaaggtggcacaaccttgctgccttgctgctcgtcgagacgacggggcatggcagtggcacgagcgcttcgggcaccttaacttcgaagccctgaagcggctcagcgccaaggagatggtacgaggcctgccgtgccttgaccatgtggagcaattctgcgatgtctgcgtgttgacaaagcagagacgactcccctttccccagcagtcgagcttccgagccaaggagaggctcgagctcgtgcatggggacttgtgtggcccggtgacaccagccacaccaggaggacgacgctacttcttgctgctcgtcgacgatctctcccgctacatgtttgtgatgatccttggcagcaagggagaggctgcgaacgccatcaggcgtgtgcaggtcgctgcggaggcggagtgcggccgcaagctgcgcgtgctgcgcaccgacaacggcggcgaattcacggcggctgagttcgcatcgtactgcgcggatgagggcgttcagcgtcactactccgcgccgtacagcccgcagcagaacggcgtcgtcgagcggcgcaaccagacggttgtggggatggctcgggctctcctcaagcagagaggaatgccagctgtcttctggggagaggcggtggtgacagcgggttacatcctcaaccgctcgcccaccaaggctctcaacgggatgacaccgtacgaggcttggcatgggcgcaagccggcggtctctcacctacgggtcttcggctgcctcgcgttcaccatggagcttggccacatcagcaagctcgacgataggagcaccccgggggtgttcattggctacgcggagggctcgaaggcctaccgcattcttgacccaagaacacagcgtgtgcgcacggcgcgcgacgtagtgttcgacgaagggcgaggatgggcgtgggacaaggcggtggacgacggcacgactccgacgtacgacttcaccatcgagtacgtccaatttgagggagctgggggagtaggcaactcttctccgagcaggtctaccccagcccccaagtctccaccaactccagcgccacactctctagctcctgctacaacgagctcttcaccaccacgcactccagccacgactccggctacagcgagctcttcgccaccacgtactccagcaccgacggtaccctctccgggaacgtcctctccgacaccagctcgtgtcgagcacgacccagtggagctcgtaacccctctgtcccgcgacgaggagcgcgtcgacgcgtgctacgacggcgagccgttgcggtatcgaagggtggagggccttctcctcgacccgtcggtgccaggccctgcatctcgcattctggcgggagagttgcatcttgcatgcgacgatggtgagcctcggtctttcgcggaggccgagaaacatgcggcttggcgttctgcgatgcagtcggagatggacgcggttgagacgaaccgcacttgggagctcgctgatctccctcatggtcatcgcgcgatcacccttaagtgggtgttcaaactgaagagggatgaagtcggcgccatcgtcaagcataaggctcgcttggtggcacgcggtttcttgcagcaggaggggatcgacttcgacgatgccttcgcccctgtagcacggatggaatccgtgcgactcctcctcgcgctggcagccctggagggctggcatgttcatcacatggatgtcaagtcggcatttcttaacggcgacttaaaggaggaggtctacgtacaccagccgccaggttttgcgatccctggcaaggaaggcaaggtgttgcgcctgtgcaaggccctctacggcttgcgacaggcaccaagggcgtggaatgccaaactggattccacgctcaagaggatgggcttcatgccaagcccgcacgaggcggccatctatcggcggggcaatggagaaaatgccctgctggtgggtgtctacgtcgatgacttggtgatcaccggcgccaaggatgcagaggtggcagcattcaaggaagagatgaaggccaccttccaaatgagtgacccggggcacctctccttctacctggggattgaggtgcaccagggggactccgggatcacacttcgccagaccgcctacgccaagcgcattgttgagctggctgggctcaccgactgcaacccagctctcactccgatggaggagaggctgaagctgagtcgcgatagcacgacggaggaggtggacgctacacagtaccggcgtcttgtggggagccttcgctacctcgtccacacacagcctgacttggcatactccgtcggctacgttagtcggtttctgcagcgaccgacgacggagcatgagcaggctgtgaagaggatcatccgctatgttgcggggactctcgaccacggtctctactacccgaggtgccctggggaggcacaccttgtcgggtacagcgatagcgaccatgccggcgacatcgacaccagcaagagcacaagcggaatcctcttcttcctcggcaagtgccccatcagctggcagtcggtcaagcagcaggtggtggccatgtccagctgcgaggtcgagtacatagtggcgtccactgcttcggctcagacgctctggctggctcgactgctcggtgatctcctcgggagagacactggagcggtggaactcagggtggacagccaatccgctctggcattggccaagaaccccgtgttccatgaacggagcaagcacatccgactgagatagcacttcatccgagcctgcttggcagaagggagcatcaaggcgcgctacatcaacaccaaggatcagcttgcagacctgctcaccaagccccttggtaagatcaagtttgttgagctttgctccaggtccgggatggcccaactgtctcacaagacgacgcccaagacttagggggagaatgatggaataagtcttgagcatctagaggacagcctgcttttgactgtcatctgtagtcctttagcatctagaggacagcttgactgtcctctgtagtctctttagcatctagaggacagcagtcgcttttttgactgtcctctgtagtcgctttagcatctagaggacaacagtcgcttttgactgtcctctgtagtcgctttagcatctagaggacaatcctgttgtgtagtgtgtgtgagaaggtgtggtagtgcagcccctagggctataaatatgtgtccccaacccctctaagggtatgccatagtgtagtgtttgaagaaataaacagaaaattgccccaactcatagtgtcatcctcttgatgagagttagagtccctctacttacagagccatctccagcggcaccggccgcagcggcactcctccaccttgatgagtcgaaagcacgcgttttcctcggcgacggctccaacaaggacatgatcgaagaatggtgcctcgacaccggcgccactcatcacatgaccggccaacgggagttcttcaccgagcttgactctagcgtccgaggctccgtcaagtttggggacgcctccggcgtagagatcaagggcgccggctcagtcgtcttcaccgccgcgtctggtgagcacaggctgctcaccggagtctactacatccccgcattgagtaactctatcatcagcttgggacagctggatgagaacggttcgcgcgtggaggtcgagcacggagtcatgaggatctgggatccctctcgtcgccttcttgccaaggtacgcaagagtccaaatcggctatacatcctcaatgtgaaggtggcacaaccttgctgccttgctgctcgtcgagacgacggggcatggcagtggcacgagcgcttcgggcaccttaacttcgaggccctgaagcggctcagtgccaaggagatggtgcgaggcctgccgtgccttgaccatgtggagcaattctgcgatgtctgcgtgttgacaaagcagagacggctcccctttccccagcagtcgagcttccgagccaaggagaggctcgagctcgtgcatggggacttgtgtggcccggtgacaccagccacaccaagaggacgacgctacttcttgctgctcgtcgacgatctctcccgctacatgtgggtgatgatccttggcagcaagggagaggctgcaaacgccatcaggcgtgtgcaggtcgctgcggaggcggagtgcggccgcaagctgcgcgtgctgcacaccgacaacggcggcgaattcacggcggctgagttcgcgtcgtactgcgcggatgagggcgttcagcgccactactccacgccatacagcccgcagcagaacggcgtcgtcgagcggcgcaaccagacggttgtggggatggctcgggctctcctcaagcagagaggaatgccagctgtcttctggggagaggcggtggtgacagcgggttacatcctcaaccgctcgcccaccaaggctctcaacgggatgacaccgtacgaggcttggcatgggcgcaagccggcggtctctcacctacgggtcttcggctgcctcgcgttcaccaaggagcttggccacatcagcaagctcgacgataggagcaccccgggggggttcattggctacgcggagggctcgaaggcctaccgcatccttgacccaagaacacagcgtgtgcgcacggcgcgcgacgtagtgttcgacgaagggcgaggatgggcgtgggacaaggcggtggacgacggcacgactccgacgtacgacttcaccatcgagtacgtccactttgagggagctgggggagtaggcaactcttctccgagcaggtctaccccagcccccaagtctccaccgactccagcgccacactctccagctcctgctacaacgagctcttcaccaccacgcactccagccacgactccggctacagcgagctcttcgccaccacgtactccagcaccgacggtaccctctccgggagcgtcctctccgacaccagctcgtgtcgagcacgacccagtggagctcgtgacccctctgtcccgcgacgaggagcgcgtcgacgcgtgctacgacggcgagccgttgcggtatcgaagggtggagggccttctcatcgacccgtcggtgccaggccctgcatctcgcattctggcaggagagttgcatcttgcatgcgacgatggtgagcctcggtctttcgcggaggccgagaaacatgcggcttggcgtgctgcgatgcagtcggagatggacgcggttgagacgaaccgcacttgggagctcgctgatctccctcatggtcatcgcgcgatcacccttaagtgggtgttcaaactgaagagggatgaagccagcgccatcgtcaagcataaggctcgcttggtggcacgcggtttcttacagcaggaggggatcgacttcgacgatgccttcgcccctgtagcacggatggaatccgtgcgactcctccttgcgctggcagccctggagggctggcatgttcatcacatggatgtcaagtcggcgtttcttaacggcgacttaaaggaggaggtctacgtacaccagccgccaggttttgcgatccctggcaaggagggcaaggtgttgcgcctgcgcaaggctctctacggcttgcgacaggcaccaagggcgtggaatgccaagctggattccacgctcaagaggaagggcttcatgccaagcccgcacgaggcggccatctatcggcggggcaatggagaaaatgccctgctggtgggtgtctacgtcgacgacttggtgatcaccggcgccaaggatgcagaggtggcagcattcaaggaagagatgaaggccaccttccaaatgagtgacttggggcatctctccttctacctggggattgaggtgcaccagggagactccgggatctcacttcgccagaccgcctatgccaggcgcattgttgagctggctgggctcaccgactgcaacccagctctcactccgatggaggagaggctgaagctgagtcgcgacagcacgacggaggaggtggatgctacacagtaccggcgtcttgtggggagccttcgctacctcgtccacacacgacctgacttggcatactccgtcggctacgttagtcggttcttgcagcgaccgacgacggagcatgagcaggctgtgaagaggatcatccgctatgttgcggggactctcgaccacggtctctactacccgaggtgccctggggaggcacaccttgtcgggtacagcgacagcgaccacgccggcgacatcgacactagcaagagcacaagcgggatcctcttcttcctcggcaattgcctcattagctggcagtcggtcaagcagcaggtggtggccatgtccagctgcgaggccgagtacatagcggcgtccactgcttcgactcaggcgctctggctggctcgactgctcgnnnnnnnnnnnnnnnnnnnnnnnnnnnnnnnnnnnnnnnnnnnnnnnnnnnnnnnnnnnnnnnnnnnnnnnnnnnnnnnnnnnnnnnnnnnnnnnnnnnnnnnnnnnnnnnnnnnnnnnnnnnnnnnnnnnnnnnnnnnnnnnnnnnnnnnnnnnnnnnnnnnnnnnnnnnnnnnnnnnnnnnnnnnnnnnnnnnnnnnnnnnnnnnnnnnnnnnnnnnnnnnnnnnnnnnnnnnnnnnnnnnnnnnnnnnnnnnnnnnnnnnnnnnnnnnnnnnnnnnnnnnnnnnnnnnnnnnnnnnnnnnnnnnnnnnnnnnnnnnnnnnnnnnnnnnnnnnnnnnnnnnnnnnnnnnnnnnnnnnnnnnnnnnnnnnnnnnnnnnnnnnnnnnnnnnnnnnnnnnnnnnnnnnnnnnnnnnnnnnnnnnnnnnnnnnnnnnnnnnnnnnnnnnnnnnnnnnnnnnnnnnnnnnnnnnnnnnnnnnnnnnnnnnnnnnnnnnncgagagctgtctcactgagttgtgagtttgaagcagtctttccgcatttgcgcggggggggggtgatggaataagtcttgagcatctagaggacagcctgcttttgactgtcctctgtagtcctttagcatctagaggacaacagtcgctttttgactgtcctctgtagtctctttagcatctagaggacaacaatcgcttttgactgtcctctgtagtcgctttagcatctagaggacagcagtcgctttttgactgtcctctgtagtctctttagcatctagaggacaatcctgttgtgtagtgtgtgtgagaaggtgtggtagtgcagcccctagggctataaatatgtgtccccaacccctctaagggtatagcattgtgtagtgtttgaggaaataaacagaaaattgacccaactcatagtgtcatcctcttgatgagagttagagtccctctacttacagggggagacttgtctcggtttatccctcccttagaccccactcatgtgggagcctccgacattggatgtactctatttgttttaaatatatgcagataaatattattttctaacaatggtgctaattcatgtataaaagtaaggagtaaaatgcatcaggtccccgaactctcaaaactaggattacgtgtcttcgaacttgacgtcttggccggtcatccaaaaccagatttgctcaaactggatgccgatgtggcgtgccatgttggagtcactttggtccccgaacttggcatgctgtatcacttgggtctcagaacttggcattttgtgccacttggcttcccgaactttctttagtacgcttcagcgtggcatgctacgttggcatcgggtttgaacaaactcggttttggatggccgactaagttcgaggacccgttttgctggttttgaaaattcgatgacccaagtgacaaatcatgctaagttcgaggaccactgatgtattttactcaaagttaagttttgggatgtgtttattgggctagggcatgctagtggggtttctctcgttgcaaaacaggggcttgtttgcaaatagttctaaaggcaccttgtgtgtgaaatgtgggttctgtgtgccaatgtcaacaagttttatggatcttgattatagatcgaattgctagaaatatagtagttcaaacagatattggaactggagctacaatttagtcattaatatactattacttcaagtatgtatgggtatcaactatcaaacataggttgtgtttgcttcagcatctgaaaagtgcttctgctctactttattgtattacaatttaactagcaccttggactatacttttggcttccaaccttttacttctccaaatggttggaaacagaaagaaattttacatgtgtatccagggcatgcttatcaagacgtccattaagcgtcacattagagtcgctttagcgctaaggcgcactcacagggcaaggcgtctagcttgccttgtgctggggagtaagacgtccgccgcggcgtaaggcgctggtggggcgtcggcagggcgttctcggagcgtcggcggggcgacgcttaggggataggtagggttttgaagggcgacggctggaaacagagaagagggtttgacctgtgtctgtgtggcagctgcagctgctgcctccttcctcgtcggcgcgcagtgctccggccatcggaggtgggagactgcggtggaagaaccgagggagagagagagaggagagctgtgggggagggagagagaggggactgaagagagatgcagcgtgagggaaaaatagaggctggcggctgctactaggttgctggcggctgtgacctaaaactgtgttttgggctgagctgggccgagttgggctggactcacttgttgtgaggttctttcctgccttttttttctgcttctactagactgaaattggacatattagaccttataaaagtgctagcttgcttattaactttaaattagtgatatataaataatgtttgatctaatttttttgatatttatctatataactaaggcctcgcctcgccttacgctttatcgcctaaaagataaaagagggttggtcgccttatgtcgccttaccgccttaataactatgatcaagggagagaaagaaaggggtaggcttcatagttgtttcaaccaaacaatttatctttttcatagtgcatagctcacatcatcttttccaaagctcacaactcacaacaacttttctatagcttagttgacccaaacaagcccataattgctttttgtttggacctaccagctaattactcatgtgagagcctctgacactaggtttgtcctactaactaactacacaacacatcataggtacgtaacctttagctctctagaaaacttgggcaagtaattcagccaccctgaaatggtgctctataaatgtctcggcttgccaaattttgtttgggccagccaaaatttgacctccaccttgggctcaactctctgaccatattgggcgcttggatcatatggaatggaaccactgtaactgttgttttattgatttttttctcgaaaagcgcaggagaactgcaccccattatattaagaccgttgtttttattgatgctaagtgtttctgaagccatgatcgtggcaggagaagagcgtcaactttggtctatgacaggggctagaggaatctcctgcttgattgtccccaaggttttgagtgcttttttagatgggacattctatgtctcctttttaatcagtgtgtttgtaactattaaatgtggtgtttgttgtgtgggttgtggttcctaaccgaatttcttcttaatataataaagtgccatctctactgcattttcgagaactttttttgacctccaagtggttgccagattgttggggcacgaccaaattttgattttgcatcctatgagtctcatactaaacgtgtcgtgaatatccttgttttatccatgatcattcatttattcatttgcttgtgccttctgtgtagacatgttttttttgcaggtatatgtgtggttgcacactcataagttgcagttgctactaccttgttagttagtctatggttttgctgctttgattgaaccaaaataaaatgttagttgcaaacttttgtcaactcagctgtgtctgtcatttgtttagtattgtcctccattatcattaaggatcagagactttgtaaatggattagtttttcatgaatgttatgatgaaaaatgatattgttctgttctttaaatatattctttgctcgcaacttatattaattgtccttgggctatgttctcatgtctattgcaggttgaatgtttacttgtagaaggtgtcttgggcaaaaggaatcttgtgtattgtgcatccacgaggtgtttgcagatctttcatgtcgttcatacatggacatacctacacacttcacattctcagatgcgtactgtttttttttcaaattccttttctatctaatcttatgtgtatattttttgttgttaaatttgcagtgctggtaaaagttttgttgctgaagttctgatgttgaggcagatactgtcaactgggaatatggcaattcttgtccttccctatgtgtcaatatgcgctgaaaaggtttttgatgatttatacagctttggattggtctgaaacatacttgtgtttgattatttatttatcttttacaggctgaacatcttgaacaacttcttgagccactgggtaggcatgtccgtagcttctacggaaaccaggggggaggctcacttcctaaagatacagcagttgctgtatgtaccatagagaaggcaaactctttggtaaacaagttgttggaggatggccgcctctctgaacttggtgtaattgtcatagatgaacttcatatggtaagcttgtctaaaaccgaagtgctgctcagaacatcctctctttgctttaaaccttttgttgttggtactttcatggttatttataccacatctattttgttatgcaagttcattgccttaggaactgtcatttcagcaatctaggtttgtgacagcattgagagtactaacgtaattttgtaacatttccattgtttgtaatcttttaatagcatgcacgagataattgccatttaatgaggatatttgttggcctgttgttagctattagtgctccttggccagtgtgcattgtggaattggatttgttttatgaaacagatggagcactagagatctggtactatctggaatctaaaaagtagagcgtgtgcattttgtatgactttcttctttaattaatacaatgatacagaactctcctgcatattgaagaaaaaacgatgtacaattgcattgcaagtagtagaggttttatcattgctaactaagagcactacaaattcttgtataggtggtgtatgtggtattggtgtactgcatatatcaatcagaacttcaaatatgatttttcctctcccccttctctccgcctgggccgttagggagtgaattcagtccaacgcctaggggctagggccaccaatctagtccaagtgatgtacctttccctactgcatcattgtttagttttttaggtgttcttttttgttcaaggtttgggatggttagtcatcaacttatcacccatcctatctaatcaagtaatcttgtgtgttactttacctgttacccgagtttccatattgttaggttataatcattaagagtaatttgtaaataagaaaggtttgtcattatggacaattgccagtaaacaagaaacaacaaggagaagtaccattggtcctggcgctgaatgaattctggcagcatacttatcaaatgcaaatcatataggaagatttgactttccttagggctcccctcatatatttgtaatattaggcccaggaccaatagtctcccagctcgccattcggctaaagcactatggcagtattactatttagcaacccctaccaaaggaagcatatagcttgcatctttacctgtctttgtttacctttccatgcccttgagggttctttcaatctttcttcctgtatcctttgacttagtttgtcgaacatgatgtgatatatagttgaaacttgttaagttctccaattatgcaattaaattaacaggttggtgaccaacatagaggatatcttttagagctgatgttgacaaagcttcgatatgctgctggtgaagggactttacagtcatgtagcggagaagtttcaagttctagcagtgggaagattgcaagtcatgggttgcagataattggtatgagtgctactatgcccaacatcgctgcggtggctgattggcttcaagtaagatatttaattctcctagttttatgtacttaatgaagggatgttttactagtgtgagaaacaacattactaacccacagaagttcaacttagcattgtcgttcatttatcatattagaaagttcaaaggcatttgataaatatgtgagcaattgaacttcctaattccacttgtattttctttcatcaactttttaaggttttttttgctgtctttcttcaaacctatagcctaacatgatatcttcatcaatattatctgatcgtatgatcgaggctactcgtatgaccaccgatcatatgactaatcactattagtcatcgattagttggtctagccagctagtcgaacatttagttgtccatgtgcctagatgacctaatcgaccatgccgagttagtatccatcgctagtctccttcgcgtcgccccacatgggcaacacgggcggaaccaaccctagcaacgcaccttcttcctcacctgattctcctcaccgtcactagagcgcgacttcacaaggaaggcaatggcatgtcattctcctctgcctcgtgatcatcgactctatcaagctcctctaccatggtttgagaaggtgctcctcccagtggccaatctctagattctagatccaccgatctctaggccagacctgcgctggttgggcctatggtggccacacagtggcagtgcagttgtcccctctcctctcacaactcttcgttcgtctttggtgggtgatgcctagatccatcgtcactgtagccggatcaggcatctcccgtgacaacggatctgcggagggcgacaacccttgtggtcccaacttcattttcaagcatgttcgggtgcttctcggctctagcactcggtcaactttggcttggcattggcatgtggcgcaaatgcaatagcaactgcattgctagcttgcatggccaccaaggatgggtgctcttagtgaggcaaacaagtgccaaacctgcaaccatgacataggagatggtgggcttgctcaggcttgcgttggtgtttgtcggtacctcaagactagggtacccactcctactggatcaaggcgggacccctgtggctatccctagtcgcatagccacaggtggtccgccctggctcagaatataggttcgtccgacgaggccgctggcctcaggtgggggccaacttccatgttgggctcttcagatccctagcagcggggctccgaagccgccacatgctccaagtatggggactccctacagctttgcctaggggcctgaccccctctgggtggtcccggacacctgcgtatgctacttgaacctccgacttaaagaggtccggtattgccacgtgtttaggcccgtgccagagggtcccggactcctctgagtaccttccgaacccccaactagtggtgctccggatctgccacgtctacagacactcctggctgattgctccctgctcgggtaaagatccggtgctgccacgtgtcttatggcgtgtgacataagccgtcgggaagagcctggcgtaagcctctggcaaggggaagggccacctgtgttcaaggcgggcagagtgcgcggctgttcacacaagtaatagatggcgcgtaccccgcattaaatgtaggtggcgtgcgcaacctgcaaggcctgcccgcgtcagaatcgcgttaccaaggcaagcccattgcgtagcttggacgcccttcattatgacttctattcctcgcgtgttattgaggcatgagggaacaggcggaggggacgggatgacaccgtccttattctccctacgctcacctacgccgcaacctacgttgtagcctttgcccacatgtcgtagcccctcctcatcttaggattagggcgggtgttatccgtcacctgtctggagtttacctctgaccgtgttgatgtttgtgtggttcgtctctaggtggtctttatagggcacgacaaccatggttggctacaacgagccttgtttgtgggcgtagcttttcacctgcaatggctctgaactagctcgagagttgcatgcggtggtggacgacaatcaacttcaccaggactacatgagtaactatgttgactacacatgttggtgtgaggagagatcttggtgcaagatttggttagtattatcttgagtcgatgatgataacacctttggggggggtgccattcccttttttggaagcgtcgatgaggtgccgtctctccttaccccacgatttgttttgaagaagctctgcctagggtccctaggctggtgatggcggcgcccagcgtcgtatcctgcctgagggcatcaccttgatcccgtactaccatggttgttggtccgcatgggacatttgctgcttgtttgtaagcctcaggttttgatgagttcgctacttgcttaaagcatgtcttttgctctcctagggtagatcaataggtgaagtcagagctgcttttgtggggtgcaacaaagcttggcaatgatgacacattatgttcacttccttcaaaagccgggtcttgttgtgagtaggtggtggtgtgttagggctttggctgatgttcgttgtgggaaatcagatctacgtatcacttttgtgggataagctcgacatcgatgacgtgtggtgtgctctgttggttgtttttgtgtatgtgggttgcttaggattagtcgtatgggttgttgtgtttaggtattggccggttttcctttgataaactgtgtgatgtggtgttttatccctgggtttccttataacctaggtcaattctatttcttaattgaaacttcctagttcctactgcgttaaaaaatgacctgatcaaccatgtatataaataaatttgatataaattggtgaatgggagaggcaagcaaccaagcacattaataacatttccaccttcctctccggcgcggacgtcgcccacctctacgcgtctagcatcgccgccgccgctactacggctccccaggcgttcaccgtgaccaccgccgctgctgcagccactgcggctggactcctacccccaacctctatagcagcctcgacctccctggctacctgacctccacggccgccttcagtgccgcctcgacattcgggactctctccccgaccgacttctcccggcagtcgcccctcggtttcaccgcccgcctgtcgtcgacgtcacttgggctccaccacgtgccgtcgcgccgtccaacgactccgccttggtcgctgccatcgccaccatccaggccgccgtggccgcctcacaggagcgccaacgcgtcgcattactccctctggagcaggaatgggccatgggttaggccctgaccactcagctggccacggctcagcgtatgcttctcggtcgtggcaccccgccaccaccggcagtgcttgcggctcccctggtggtcccggagcctcctcatggctctgggcttgacgtcgacactatcgccgccctccacgcctaggccgctggggttcacaacatacagtccctcatgttggacccgacgtcctcccactaacctcactggcgcgctcaggtggtcctcacccttcggcgtttgccctcactgaccacgtcctcgacgatctcgttgcctcgctgtccccctcctgggtctagatggacaacgtggtcctatcgtggctcaacgacacaatcaccgttgagctgcaggacatcgtctgtgatcaggcagacactgcgcgccagacatggcttgctctcgagggccagttccccaggaaccaggaggctcgggtgctccacctcgacgtccagttccatctgttttctcaggggacctctctgtgggagagtactgccgccagatgaagggcatggcgaactctctccgcgacctcggtgagcctgtcgccgacaacaccaaggtgctgaaccttctacgtggcctcagcccccgctacggccaccggaaggctctcatcaagaggaccgtgcctcaactcccgctatggtcctctcatcaagaggaccatgccgtgcggaacgagcttctttttgagtagctcaccatggagaccgaggctcctccggcatcgacactctacaacgctcctcccggcggtcagacaccctcggggggccaggcctctcgctctccatcgaccgaggcccctgctcgccatccacccgctgtcattgcgactcctcgtccggctttcaccgccgacggaggtcgtcgctccctcaagggcggccgtggggtggcagctccacccgtggtggtccctccggccggggtggcggccaggcgtgaccgtcattctacaacccctggaccaggaccatcgccatgtggccgggctaggcctcgagtgcctcccgctttccggcgtcggccctccagacagcgcctccctacgacgtgccttcgatgcctccctacggcgtgccaccaacgcctccggccgcgccctagcacccgccccgaggaccaccacctcgacgccttggtccccgctggctggcggatggggccctgcatccctcgtcaccgccttcagcaccatggcgatgaccccaccccctccgactgggtggttgattccgagcttcttaccacacaactcccactgcagacacgctctctttgtcccatcccatccattcctcccacccctcctggatcctcgttggcaacgataccactttgccggtcacctcaataggtgcctcggttttccctgggccgttctatctcaacgacgttctcgtagcccctcacataactcacaatcttctttctgttcgtcggttcaccaccgacaacttttgttccattgagtttgacccctctggttttctgtgaaggatctagccacatgacccctctcacccgctgtgacagcgccaagcccctctacacgcttcggccttccaccaccgacgcgtctccacctcccgtcctggtctccaccaccacctctaccacgtgacatcattgtctcggccacccaggacctgatgtcatgaccaaacttaacaacaatttagatccttcatgtagtaggggacattttgatggtctctgtcatgcttgtcagttagaccgacatactcgtctcccattcaccactttttggtttgaggagtcttttgacctggttcattgtgatctctgtacctcccctatactcaatctctttggttataaatactatttggtcattttggatgatttttcccattttctttggacctttcctcttcggttgaagtccgacacgttcaccaccctcacacacttcttcacctaggtctccactcagttccgtcgcccggtccgtgccctacagtgtgacagtggccgcgagttcgacaaccatgcctcccgttctttctttctcaccaacggcgtccagttgcgtctctcgtgcccctacacctctttccagaacggccgggccgaccgcataactctttctcaccatttgctgccttctcttccaggcgtctgtccctgccagctactggggtgaggccctacacaccgccacacaccttctcaactctcttccctcgaaggcggtgagccaccctactcccacttcgccctgtacgacacaaccccttcctacgaccaccttcgcgtgtttggctgtgcctgttatgctaacacttccgccatcgctcctcataagctatctccttgctccactcgctgtctcttccttggctagtcccctgaccacaaagggtattgctgtcttgacctcagctcgcaccgtatcatcatctctcgtcatgtcgtcttcgacgaagatgtgtttccttttgctggctcctcccacccaccgatctcgactccctacttgagtctgatccggttacccctctataagtagatggactctaactctcatcaagaggatgacactataagttcgggcaattttctgtttatttcctcaaacactacacaatgccatacccatctaagggttggagacatatttatagccctagaggttgcactaccacaccttctcacacacactacacaacatgattgtcctctagatgctaaagagactacaaaggacagtcaaaaagcgattgttgtcctctagatgctaaagagactacagaggacagtcaaaaagcgactgttgtcctctagatgctaaagagactacagaggacagtcaaaaagcgactgctgtcctctagatgctaaagagactacagagtacagtcaaaaaacgactgttgtcctctgatgctaaagagactacagaggacagtcaaaaaaacgactgttgtcctctagatgctcaagacttattccatcagcctccaccctaggcgtcccgccttgcgccgttgcctgtaccatgtgcggcctcgacgcctccactcgcgcctctaccggcgcggcgacgacaccgtctacctcctgctctacgtcgatgatattgtgccgacatgcaccgtcgacctcctacagcgcacgatcgtcggccctcagcggtagtttgcgacgaaggacctggggcccctccaccacttcctcggcatcaccgccgaacgctggtcccagggtctcttccttcaccagcgccagtacgccatcgacatcctggagcgggctggcatattcgactgcaagccctgctccacgcctgtcgacacttaggcgaagctctctgaggacggcggcccccggtcgccgacgcgacgtcttaccggagcctgaccggtgcgctccattacctgaccttctctaggcccgacatcgcctacaccatccagcaggtgtgcctgcatatgcacaccccgcgggagccccatctcaccgctcaagcggatcctgtgctacctccgcggctacctcgactacgacctccttctccgaccatccccgacgtcggagctcgtggtctacaccgacgctgactgggccgattgtcccgacacgcgccggtccacttccagttctgccgtgttcctgggcgccaacctcgtctcctgggctgccatgcggcagctcgtcgtctcccgctccagcgccgaggtcgagtattgcgctgtggccaatggtgtggcagaggcctcctagatgcgccagctactacacgagctccacatctctcttcagcgcacaaccctcgtctcttgcggcaatgtcagtgcggtctacctctccaccaaccccgtgcatcatcagagcacgaagcatgtggagatcgacctgcagttcgtccgcgagcgtgtcactgcctgtgacgttcgggttctcagcgtccccaccacgctgcaatacgacgacatcttcaccaaggggttaccgtcgagtgtatttttagactctcgatctagtctcaacatctgatctgtacaagatagagttgcgggggggggggggggnnnnnnnnnngcagattttaaaataaaggtgcacagatttgcttcagctctcttcgcagcctctgtgtgttcggtggttggtaatggggcaaacactctcttctggacagataaatggcttcagggccaatctttgctccagattgcccccgcgctaataaatcgggtgcccgcgaatataagacggcgcagatctgtccaagcagccttaacagccaatggttgggtgcatgatatctctggaagccttacggcgcaggtgctgtttgaatttttattggtttgggatttactccaagaggtgcaactgtaccctaatgtggaggatcaacatcggtggttgccatcctcctcggggctgtattccgccagctctgcttatttgcgcttccatggtggtgcaacaacctttgagcctgctacaagaatctggaagacttgggcccccccgcgctgcaagtatttcatttggcttgcatctctcaaccgatgttggacggctgatcgactggcacgtcatggaatggatcatccagatagttgtcccttgtgtgatcagcaggatgagtcagtgcatcacttgctggtggattgtgtttttacgagggaagtttggtttacaacactaagcaggctaggtttgcaacatcttgctcccacgtctgatgctacannnnnnnnnngggggggggggggtgttagaattccatttacggtttggggttctcctcgtgtaattactctctcacccctgtgtaatgggccatgtcctgttaactcatgtctattaatacatcacccaaccccaagatagagttagggtttcccacactgtgtaatggactaggcctaacaacctgggtctattaatacaactcccaaccctgagttagggttaggttttcccacatgtaatagaggtaggttagtttctctcccccaccccatcccaaccgcccgcttctttcccagcctccggtcgccgtcagctgcatgctctagccgttgtccgccgtgtgctcctccctgtcgtcacatcctgcagccgccgaccccgccatggatcctccccaatccgtccctcccctctccttcgcgctggatgctagcgcggacgccgggcttggtgcgacggcagccgacctcgacatgcgcgccaccgcggccctcgacgcatgcacctcgcccgcgcaccgccgcgaacgccgccgccgtgtacgccgccctaggcgtgaccccctcatcggctgatctgcacggcgccataggcgtgtgccctcccttcgctagctcgctctttccccatggctcgtcgacccgctgcgctcgctgttggcccccctacatcgacggcctcgggcccctccgcggcgcctctcctacgaccttcgctgcacaacagcgccaaggttctctgcctggcttcctcgccctcgctgctcctacatggaccgaggacgtcgcttcctcgtcaggctcctccccaacttcctcgacattggttatggatatcgccaccatccaggcggctgttgcggcctcctaggaccgtgagcgcgccacgactcttgccttggagcgcgagcgcgccatggtgccgacttgaccacccagatggccgtcgcgcaacgcctcctcctcggtcgcagtaccaccccttcaccggtggcccctgggactccccatgcccaagggcttgatgctgacaccatcattaccctccatgcttaggtcgccggggtccacaacattcggtccctcgtgtgtgttatgctggacctggcgtcctcccactaccctcggtgtcgcgcttaggtcatcctcacgcttcggtgatactcccttgttgaccatgtcctcgacgaccccgtcgttccgctgtcaccttcgtgggtacagatggacaacgtgatcctctcgtggctcaacgacaccatcaccatcgagctacaagacatcgtccgtgactaggcgaacaacgcgtaccaggcgtggctcgctctcgagggccagttcctcgggaatcgggaggctcgggcgctccatctcgacgtccagttccacctgttctctcagggggatctctctgtgggagagtactgccgccagatgaagggcatgacaaactctctccgcgacctcggcgagcccatcgccggccatatcttggtgctgaaccttctacatggcctcagcccccgctacggccacctgaaggctttcatcaagaggatcgtgccttttcccacctttcatgctgtgccgaacgagcttctcctcgagggccccgccgatcacatctacgccgcatgaagcacgtgcagcatcagcacacggagcacatggagatcgatctgcactttgtccgtgagcgggtcaccgccggtgacgttcgggttctcagcgtccccaccaagctgcagttcgccgacatcttcaccaaggggctgccgtcgagtgtcttcgccgacttccgatccagtctcaacatctgtacaagatagagactgcggggggggggggnnnnnnnnnnnnnnnnnnnnnnnnnnnnnnnnnnnnnnnnnnnnnnnnnnnnnnnnnnnnnnnnnnnnnnnnnnnnnnnnnnnnnnnnnnnnnnnnnnnnnnnnnnnnnnnnnnnnngggggggggtgttagagtactgttagggtttcggggcttgtccctgtgtaattacttgcataccctcagtgtaatgagcttggcccatatagcactcccaactcagttagggttagggtttcattctccaacagttttgttcattatgagcacattttttgtcgacttgatttgttaatagtaagttattctgtgaaggtgctaacttttgatctgtttgggtaatatgaatgatttatagttgcatacctattataattgacgctatgtaatcttaggctgctctttatcaaactgactttcgaccagttccactggaggaattcataaaagttggtaatcaaatatttgataaagacatgaacgttgttcgtgtccttcccaaagtagctgaccatggtggcaaggatccagatcatattgttgaattgtgtaatgaggtaaatctgttatttacattgcaggtcttagtttttctctgttaaacactacaattttgaagcaaattgaatattgtacttgtatttgttccaggttgttcttcagggccattctgtgcttttgttttgctccagtcgtaaaggctgcgaatcaactgcaaggcatgttgccaagttcttgaaactaccctctgttggaacaactgatgttagttcggagttttcagatgctgcagctgctattgaggccttgaggaggtgccctgctggattggatccaatattgggagaaacccttccttttggtgttgcatatcatcatgctggtcttacggtatggaagctatcttctatcttcataagatacacaaaatatcaaatatatatatatatatatttatttatttgaaatttgcactgctaaatatgtgctaagtggtgagagtggtctcactaagccaccaggtcgcgggttcaaagcaaccccttcacatttgcgggggaagggttgccttggttttatcccttccctagaacttactcacatggcctccgtcactgggtctgccctttacactgctaaatttaataaagtgatgccatttttacctaaccacagctgggcaaagggtggtaggaactgatctgccattacctgttctgattgatccaatgagcgtcatcgccttctgttctgtggcaggtcgaggagagggagattgtggaatcatgctaccgtaaaggccttgtccgtgttctgactgccacttcaactttagctgctggtgttaacttgcctgctagacgggttatattcaggcagcccaagataggtcgtgattttattgatgggactcgctatagacagatggctggtcgtgctggtcgaactggaatagacacaaaaggagaaagtgtaagctacaatatctttgttccactttattctattagagaatggttctgacatttcactagttctgttttaattgtgtttttaactttagcctaccccaactgcttgggagaaaagggctttgttgttgttgtctaataatctgacatttgaaatgcatgcagatacttgtatgcaggcctgaagaggtcaagagagttacaggtattattagaagcaattgccctcccttggagtcctgcctctcagaagataaaaatggaatgactcatgcaattatggaggttgttgctggtgggattgttcaaactgcaaatgatattcatcgttatgtgcggtgtacgctgcttaattccacaagaccttttgatgatgtcgtgaagtcagctcaagactcccttcgttggttatgccataaaagctttcttgagtggaaccatgagaccaagatatactccgctactccccttggtagagctgcttttggaagttcactcaaccctgaggaatcattggtagcatacttgtcttttgctccttcattattttattgcattgagaaagggcctctagctgagttggttaggtggtctgagtagcactccttaggttctaggtttgactttccgtgggagcgaatatcagcctgtggttacctcccatttgtctgtcccacaccaaagcacaggtctaaggtcctgtctagatcgtagtcgtttctcaaatgggctacggtgccgctgtgtatgggtggggcaggggttcgggggttttctcgacctgcgtgagaaggtcttcttaatataatacccgagggctgtcttatcccccgcaggtcgagttttttttttattttattgcattgtttaatcttgcatttttctgtttctgcactaggttgttcttgatgatctttcgagggcaagagaaggctttgttctggcatctgatttacatttagtttacttggtcacacccataaatgtagaccttgaacctgattgggaattatattacgagaaattcatgcaactttcttctcttgagcaggtatgcaagtcttcttttgtcctattgcacttgaaagttcatttatcaaactgtaaatagaatatccagaaattcgagttctatctgtactcattagaaaatagttgaaagtgaattccgaaaacatgattttagttgctgttgaactaaatgtgtgaagcaaaagtgaattcagaaaatgcaaatcaaatttgttacggttataatagtcataatattagtgtaatcttctagtctagggtttccctcatgtttctcatgtactcttatagtgcttattcatccaattcagtgcttgttaatggaatgtgtgaagtctatttcggtatttttacataaccatgaatcagactaaaacatgcatatgtttattgaactccttcgcactgtacttggttgcagtttactacatatgttatttgacctggttcataagatttttttaggagttgtcagttcttattagttttttgtaattcccatgttttctttggcccaacaagaaacagaacaactgacatgataccatgttttctgcagaacattaatcttttatcagtggtattatcattagtgccaaaatgtttataactgtatgccatgtctaccctactaaggcctaagactgtgtccaacactgttttgcactgttcacagagtggagccaaatgtgttcgcttgactttaatccgtaccggcttctattgtttctacagtatttttgtctgtatagattgcagctacagcagtccaaacagttggctttaatctgcagtagctacagacccttttggacttgcgcactgctcatgcgaaaagtggatgcgttactgttcatgtcgggtcctgggtttgttaagacagatattagattagatcgggttgacttgttggctatttctttaactctagaaaatagttaaggatcaaatctacacatctctattgggattgtatctactttgaattaagtaagaaatagatagttcaacagttcctatctggctatctacctccttaacactggctttctcgcatggccaacatgaagtatgcctgtgacaccgtatctttctgccatattggttgagaaatcaaaccattacttaaattatcaacttcagttcagttcatagaacacataatttcactcatttttttaatttctgtttgttttgttggtacaatgcagtcagtaggcaatcgggttggagtaattgaacccttcttgatgcacatggctcatggggcgtcgataccttttcgtgcaaggcctcagagaaacaccgggttaagtaacaagtctgcacaagctgctggaaatactcttgttagtgagcacacaatcagagtgtctaagcgcttttatgtggctttaatgttatcgaggcttgctcaggtataatctaagaactacttagacattgcatgttagttctatgtcaatgcatagtgctcaagatcgctagaaagcctaagtcgtgaaatgtaaaaaatagttcaatagagattagataatgaaggttgaaatgttctctcattatatatggctaattaaaatattagctcatgtcttatatttttgtagaatacacaagagagctatgtatcatttcattgagaagggtataaataaataagttacaacacacccaccacactcacacatatacacatacaaacttgtactggaaacaattcacaacacacccaacatgccttttgcatcagaacaagacccttgggtgggcatttggggaactaaaaatttgtgggtactagaaattgctacccaatttcgagtttcgacctcgaaaaagcattagccaaaattttagatacttgataatttgagttccagttttacttggtgtacctgataattccagtagcattttaaagtaagaaacaaaagtccatcaaatcatttcatatcaattaacaagaaatcaattatcaagatagtacaaatctacattgagccataccaaataatagatttacactatactgaaccactccatatcttcatattagaaaatagaagaacaaaatttttgagatattttgcgtaattcgggtataaatttacccaaactacctgaatggaattcagttttctatagctactattacgaagatggtttccatggtgacctgctagatgggctatatgggcgactcagtttgtgggaatcttatccaaggtatcaaaggtgggacgacaaccactcgaccagccgtgtttccacctgtgaattccttcacgatatgcctgccatctatggctatggcctcgcgccacctcccttttatcaaaccacgcgagcaacgtccctcccatcgggttttcaatgtttatactcgtttgtcaaaaaggaaaatgctctcttgctcagtttcttggcaacatggactttcaagaaaattttcagacacctttttggctctttctatggaagccaccgaagaatacctcaagttctatgatacaattatttcagttcaaaacaacatgcaaggcaaggataaatggatctattcttggggaaacaacaatctacgttcaagcaagatttacatattaaacttacaatccatgtacccaccttctcctttcaagtggatctagaaatccaaagtgagtaaaaagatcaaggtgctcatttggctgaccttcagagacagaatcaactcaagaaattttcttcgaagaaagatgtgtacaattacaaatgatgattacaaccatgttctttgtggccttaattgtgaggaaaccacatatcatcttttatttgaatgtccattcagtacattgtgctggaatcatgttggtattcactgggatcaccctttggatttttttgaaatgaccatatctgcgagggatcaattcagtaaaaatttcttcatggaaattctggctgttacgacctgggagattttggaagcaaagaaatgctgctatcttcatagattcctttccatcttttacgtcttggaggttttgcttcaatgacacgttggggctacaaatgcatagaatgaactcgaatcttagcttgtcgatttccttgtggcttgcttctttattttctttacttctatctccatttgcttctattcttccttccctttactgtacatttccttttttatttaatatataccactgtatgggccttccctacagtttcatcggtcaaaaaatgtccctccaatgccctccctactgccacagtctaccatgccacaggttgttgcagcactaccatgcgctcccaccatatcttgcccaatttcatgtgtatttacaagaatttactggtataagttgctgagaaagtttgggttacacagtttgacccctgagccaggacatacatccttcctagactggtgggaggagtcttctgaagaagttcatgggatggttaagaaaggtctgaactcccttatcatcttgggggcctgaatgatttggaaccattgaaaccgatgtgtctttgatggactgacttctagtctttcctcgatccttgtgtagactgatgatgagagaagggcaactttggttaaagctgtgctcactgctattcccatttatcatctaattgctttgcaatgtccaaggtgggtaatcaaggcaatagacaagattcgcaggggttttctttggaaaggaagaactgacattagaggaggacattgtgtcgttgggtggtccaaggtctgtcgtcccctctctcttggtgggttgggaattcacaatttggaagtnnnnnnnnnnnnnnnnnnnnnnnnnnnnnnnnnnnnnnnnnnnnnnnnnnnnnnnnnnnnnnnnnnnnnnnnnnnnnnnnnnnnnnnnnnnnnnnnnnnnggcccccccgcgctgcaagtatttcatttggcttgcatctctcaaccgatgttggacggctgatcgactggcacgtcatggaatggatcatccagatagttgtcccttgtgtgatcagcaggatgagtcagtgcatcacttgctggtggattgtgtttttacgagggaagtttggtttacaacactaagcaggctaggtttgcaacatcttgctcccacgtctgatgctacaaggtttcaagattggtggagtgaggcagaaagacaagtgtctaagcataagaaaaaaggtttcaactctattgtaattttagtagcttggcagatttggaagcatagaaatgcgtgtgtgtttgacaatgcttccccaaacattcacgcaattttgctgtccatccatgatgaggctttattatggggtcttggaggggctgctgctcttaggcaggtttggttgtagtttgatttttggttttttaattttcgggggtgctttcttggcacctttgtactgggtcttttctagacccttttttcttatcttcttaatatatattgatgcgtggttctcccacgtgttcgagaaaaaaagatgatgagagaagaatatgggaattagctggggccaggggtctttccttcttggcaacacctcttcttgaggtctaacccccctggctctttagtgggtagtgtgagtgtttttacatggatcctttcatttatgcgtgctgttggcctctatagggaggttttttcttgtaacccaggtcttctttagaccttcctttccctaatatatttaaagcttagttcccctgcgcttcctagaaaaaaatatctcgcccaattctcatgcaccaaattcagttcccaacatcgtcttggctgattctaggatggtttgacacattatcgctggccttggtggactacattgccgctgcccatgcagtgtcgtgcttccacaagcttgaatttcattcatacgaatgattgacgtagtgtgagtagttcttccatggctaacacaccttggaggtcgacaagtcgtatcacctattcgaacatgacacgagcacactatcgtggatcgaattcaaggacctttgcaacttgtgtttttggcccccaattcgcaacaaccgcgttgacacattggctcgtcttcgattcttgaccaagatgcaagaataccaagatcatgtcatgccaacaagcgaagttgttcgctatgggatttccaaaatatatcaatcttgacatgaaattgtgggagccccaaaatcttcatataaaatcttcatataatcctatcatgatggcacacactgaacaaccatgaccctagtgtgcgttgtggcacactgaccaaccatgaccctaatgcacaatcagcactgatgctgaactccaacgaggaccactccaatgacaagcacatggacgagcaacaactctagcgttgcacctactctgtctattaacatcaatcgagttgtctaatcatcggaaacaagggttttgtcataattgtgatgagcaatacattcatggccatcactacaagtgactcttctacactgacgttgtcaactatcaggattatattaggtggctatgttgttgtcctcagtgtggccttcctgcgcatacttgcctcgtgttctagcggtaccagtgccacgtcttatgaaggggcattaggtctacatgcgcaagaagtctagctatggttaacgactccgtcaacaccacaaactctaggttcatggaccatctcctcaacatataagttgatctttttgctgaaacaagaggactttatcggcttggcgctgccaccactgcatgcacctgctactaaggacaactctagtagatgtcaatccatacatatacccacaactctagaagaataagctccatgctcgagaacaacatccaactgagtacattagcattgttgggccttgatgcttctcatcaagaaggttggcaactcatggaggttctgctttgactacagtgtgttgaattggaagacagtgaaggataaattttcgatcctgatggtcagtgagctactcgatgagccacccaaaattctttatctagctcgacctttggtcaggctaccaccaagtccacatctaccctgacaatgcgaaatgatgtttcttacacatcatggccacttcaagtttcttgtgataccgatgagcatcgccatcgcactagccacattcaacaacctcatgagcgacatgcttcgatagttgctttgctggctcgtccttgtattttttgatgtcatcctgttatagaacatttcttggatggagcatttgcaacatgtcaaggtggtgtttgatgtgctatgtgcgaacaagttgttcatcaagtggtccaaatgccacttcggtgtgttgttcgtctcctaccttgaccatgtgatctcggtgtatggcgtggctgtggatggcgaaaaggtggaagttgtggcatcgtggccacaactgtgatccactagggaactctgttgattccaagtatcgcgggtattacaagaagtttaacaaggactttggggtcatcgtagcacctctcatgaagctcttgaatgagggtttaggtggtgccaagaagcagaagatgccatgcaggggactcaatgggctgctatcaaccgcacctatactgcagttgttggcatttgacaagctgttcacggtagactgtgatgcgtcgagttgagtgcactaaggcgccagagcattgtcattctttagtgtaggtccttcgtagctcgacatctcaaggtggtagcctacgtgtgtgatacgattggcatggtgtaggcggtacaacgttggaggcatgggcttggtgcaggcggtacaacattggagtccctacttatggggttgaagccgatatggcattggagtccctagttacggggcaccattttctgcgcttaaagttcctgctcgatcaaatacttatcaaccccaacatcaatggatcaacatgctctttgactttgatttggttgaagtgtataagtggattgcctagcttctcccatcagcttaagcttttgggttgaactggttagtgtgtccactctaacatggtatcaaagccagaggtctcgagttcgaatcctgacagagacttaatttgtgcctccacccatttatttccacgtttgcgcgtttctctttgtctgcgtttgcgcctttctctctggctacacgtgagtggggggtggtgaagtgtataagtggattgattaccttctcccattagcctaagcttttgggttgaactggttagtgcgtccactctaacatggtaacagaaccagaggtctcgagtttgaatcctggcagaggctttatttgtgtctctacccatttatttctgcgtttgctccttttccatcagcttaagttttttgcgtccactctaacatatttcatagtgaagttttgggcaagcggaacacacttgctgacaccttgtccaatctcctattgtgacattgagactgtaggcactctcaagaccctcgttctagctctataacgacatttgccacgaggtccagacacagtgagttgggcgatccttggcggatacacgatgtcctcatcctccacgacaactagatcttcctagacacatcctctagcttgttgttcacttctttggagatcgcacaagacaagtgtccataaaaacgctcaagtgcctccaagtggacttttatattgctcgaggccgcaaggtggtctgttattttgtgaaagccttttcacatgctagaggaacaaaatagaaactcttcacctgtcgggactgctctagccattgctggtgatgttgaaggtttggaagggtgactcccttgacttcatggaaggccttccaagggtgcacgagaagtgtgatcctcacagtcaccgaccatttttctaagtatgcacatttcattgccctcgttcaccacctatagattgtggcatcggttgtgaaggcgtcattcgatggtttttatggcttttctagcatccattgtaagcgaccaggaccccgtgaaaggtaacttttggctggacctcttcaagatggctggtgtgagcttcgtataagcatagctttccatctacaaactttttttttcctcgaacagcgcaggagaactgcgcgtcatttcatttaaggaagaaagtaagtacaaaggtcaagagtgacccgaaacacaaacaccaacacacacacgccatccctcaaatacaaccgtcgcgccacatcaatgaagaaggcgaccacaacctacagggctaaaaaagcaccagtaggcaccgacccaaaaacaagttcctggagtttggaagctccagccaaacaccacagccccccttccacattaacagcttttagcacttcctcaacacatggcctagaattgtcaaagacacacctgctgcggtgcttccaaatctcccaagccactaacataattagtgaattgaggcctctacgaagccccttaggaacagcagcaacagttctcttccaccaacctgggaaccgagacactagaggtggtgaatagaactattgcaatgtacttgcagtgcatcacgggagataggtcgtgcacatggctggaatgactgccatgggaagagtattgatacaatacatccttccaaatcacgctcgaagataggcgccactgcccttggtcccattcacagtgcgcaccacgcgaactcaagcagtgcagatggcgctttaggagcgtgaccggtttttggcagagctctatgaatgactggttcaagcccaatatcacgggaaacgctaatacaataagcaccatcgcaaactagagttcgagatcggctcttgggtgtggccatgaacaggttgctgaaaagtgtctctgataccaaagatgatttgtctggattgttggctttattgatacaatgacaaggaaatcatcctgaccgccctccctaggaggctctggtcataataactcacttcttgctaaacccgtaatcaacattaggtttacagataaataggcttagaggttagctgttagagaaaggtatatgctgttgcaaaagatgatgtcttgcattgagctcttagatgatttatacagagtacatggcgtaggaggtaagacaacccatggatacatatggcagtctatgaagtataatatctagactatcaaatatactctaacacatgtggcagtctactagacaatatctagactaccaaatatactctaacactaaccactcccctagaatttctcttttttcctattgttcctcctagacttccaactaagctccatgcagacaactacggaaaaactcaacaaacttgacaactaattaggcgtggctgttagccacatggtgttgtggacgctggcttgttcttcttgtggcgagtatagacttgctgataagcgtccacaacaggttgttcgtgactgctggtgtgttaactctactatgaaaatatctatgtgcagtatgaagaagctaagctatttggttcagaactgaacctgtattcagtcttagcaactctactcatcaccctcctctagttgcaacccaatagagtatttctgatatgtctttcatatcatatgcattttgtacaagcagattagattatgtccaagttgtgtattgtaatgattttaatgtaagtttgtcttgtaatatagtctttaggaattgttccttgtggtattatttattatctgtttcttcttgtcttttgtttgtttatcttttattccaagttggggtgttcccatcttgtttccttgaaaagattgtactgttctcatgtaatgcttctttcaggagattcctattgctgatgtttgtgagacatttaaggtcgccagaggtatgattcaggcactgcaggaaaatgctggcaggtttgcttcaatggtttctgcattttgtcaaaggcttggttggaatgatttagaaggccttgtttcgaaattccaaaatcgtgtctcttttggagttagggcagagattgcagaactgacatcaattccatttgtcaaggtgtgctttaattaccatgcatatatgaattatctaagtgtctctggatcttatttcagtatggtcatgtaaaatatgaaatagggttcacgtgcaagggctttgtacaagtctggtctgcgtactcctgttgccattgctgaagcatctattcctgaaattgcaaaagctctttttgaatcttctgcttggtctgggcaaggtactctttcacgtattcatggtctgattccttactactcttttttatagtacttgttttgatgaggatataaatactatagctgaaatcctgtcctgtacagtcaaggattttccttgtacttatcttgggctacctctcacaattggcaaacccacaaaggaggtcttgctgccataattgaaaaggtggcagaatttttgctgggatggaaggcttctttaatgaactgtgcaggcagattggtaatggttcgagtagtgttaactgctgctcctatttaccttttgattgccatggatctaccaaagtgggttctaaaagccatcgacaaaaggaggggtctcctctggaagggccaggaacaagctaagggaggtcactgtttggtctcttgggaaagggtgcaacagcctctggaatatggtggtcttggaattcataatctggatctgcttggctgcgcgttgcagattcgctggttgtgggctgagaaaactgatcctagtaggctttgggcaggcctccccgctcaagtccctcgcaatgcttaggccctcttcaacattgcagtggacatcattgttgggaacggtgagcaaacactcttctggacagacagatggctggatggccataccatatctgaagtggcacccagcttatttagtgctgtctcgaagcggacagccaagaggaggacggtagcccaagctctccaaaaccaaaggtgggtggatgacatcaaaggagcactcacagtccaggttatattcgagtatctaaagattgtcgcatggtggatggtctgtttttgcagcaagatgtgccggaccaattttgtgtggaaattaacacaatccgacatttacacagcatatagtgcttatttcattggcaccatcaaatttgggccatggagaagaatatggaacagttgggcacctcctcgctgtaagtttttcatttggctggtgttccataaccggtgttggacggttgatcgccttgctaagagaggcttgccccaccctgatgcgtgccagctctgtgatcaagatgatgaagacattcaccatctcttggcctgctgtgtttttgctagacaagtatgagcaagcatctttcttcagtcgggccatactgccttggcgccatatgcttcaacaatctgtttttcaaaatggtggtggacagtaatctcaactgttcctaagaaaatgcggaagggtctaaattctttgatcattttggtcgcttgggaactgtggaatcattgtaatgcttgcttgtttgagcaacataggcccaatgttcaggaagttcttagggctgttagggatgaaggtagtctctagtgcagcgctggagcaaaaaagctccaagagctaatggtcacggtgttcagtctgggggattaggagcttgttgaggttcctttccctggccgcctttcttttttctcttctgtttgggttttagcgtctccagggtgggaggcgtgatgtacagtgggtgtgggtgaggtgttcttgtatttatttttggcattcctgcctttcttctaccttaatgaaatgttgcgcagctctcttgcgttgttcgagaaaagaaaagatgcacaaattggtttctcagttacttctggatatattcagtaataagcttgcagatactttattgtttgttttaagcctactctaatgtcaatctgttgaattgactaggtgattctggtttacgacgaatgcaatttggtgtagcaaaaaaaataaaaaatggagcccgcaaaattgtcctggaggaggcagaagccgccagagtagcagcattctcagctttcaagtcacttggtgtggaagttccccagttcactgcacctccactcgcagctattgaggaatatccaactcacgataccatagaccaagctaagttaaataagctagcttctggtacccattctagagatgataaaaatatgaatacttgctctgattatgctactccaagggcttctacatacagtctaagaaaggacacaagtcctgctccttccattcaaatgaaagagaatgcaggactatctaaaaatgtgcaaatcactagacagggagcatcatcatctttgtcaacagaaattgctgatggatctagtagagatgtggctgaaaaaggtcctgtccatgcatataacttcccagggggatttgattgttttcttgatcaatggtccacagctagtaattttttctttgatgttcattttatcaagagatcgatgaaaccatctttgaacctttttgaagtttttgggttggctgtctgttgggaaaaatctcccatatactactgcaacttcccaaaagatctagtcactactggcaacaataacatcaaggaaatgtggggtaattttcagagaagatgggaaaaaatagcggacattatgaaacaaaagagtgtccaaaaaatgacatggaatttaaagatccagatccaggcacttaaatcaccttatatttcttgccaacggcttgaaaggtttcatcttgaccataaaatgctggacaaagttgaagtgcttaacaactcatatatgttgttatcaccagtctctgtctacaatggattggatatatgtctgctggcgtgggttctatggccagatgaggaaagcagagcggttccaaatcttgagaaggtatttgatatatgtcgtgttctgcaatatctttagcttttcgttgctgatgcattgtcacttcatgtacattttttatattcgtttttttctgaactttgcaaaagcaatatgagtaggaattttagttgataagagcctcaagaaccgtgtgttggatatgaaaatgcaaggaaataggattattcatatagggcatgatgagaatgctaagagactttttaggaagacttagatgtcatgtttacaactatacctatcagtaagaaacttttcataggagatctcaatgggcatgtaagtacaacaagtgtaggttttgaggtgtttcatagaggcttccccaagcttcacgtctcagacaatgtttcttgaccaagtgggtttggctatgacatgaagctaagaaacattgtctggtcatgtccactttggagcgtaccgctcgtttacgctctcgaatctgcttccttaaagatggtgataccaattccatagctatgttttctggtcgcccgaccagctagtcgaactgggggatcgaccagcgactaatctcgattagtcgtcgactaggtccgactaatcgagctctggtcgacctggtcgtcctgttcatccaggagaccaggacctatgtatatactatataatatatactattatactatatagtaaataattatataactatatagtatatatgaacttcatatactatattatgaaggatagggtaaacatgacatgaattcagcaatactgaaaagtgaaaacagcatagaaacacttctagttattaatactacaagtcccagataccagtaccacacaacacacattaatactacaagtccaaaaaaaaatctaggtcctaaacctagtcgcccagaaccggctaatcgagcgactaatcggccctaatcgtcgactagtcggacgaccagggcgaccaggtactctagtcgagtcgactgcctaatcgagctctgctaaccgactagcccgactaatcgcgactaatcgcgattagtcggacgacttgaaaacacagttccataggcatgccagtttccggaaacaaaagaactttattgggaagttggtggttgatgatcagattttcacctcgcaagatgagaaacagaagcttgatggtatcttaattgcggatgcaagaggagacttatctttcagttatatcttttggtcgaacaatgtgcttgacaagtggagtatagtggtactaatctacacgagtaagggaaatatttaaagttgtatcaattaccaagtaattaagttgatgaaccatactatgaagctatgtgagagagttatcgagcattgtttgagaggaataatgaggatctctatgaaccaatttggtttcatgtccgaaaggtcaaccatggaagttattttcttaataagacaagggatgaagcagacagggagcagaaggacctacacatggttttgttgacttggagaagacttatgacaatatactaagaaatgtcatgtgttggtttttggacaaacataaaatctcaaggaagtatgttgtagtcattaaagacatgtgttcgaacaagggatggagacacaaataacttttcgattagaatatgactacatcaagggctggctttgagcccttatctttttgccttggcgatggatgaggtcacaagagacatacaaggggataccccttggtgtatggtttttgcgcacaatgtaatgctagttgatgaaagccgagcaagagtaaatagaaaactagagttgtgatggaagactctagagtctaaaggtttagactcaatagaacttaaactagagtatatgagatatgacttcgacactactgcacatgactacatacggaaagagatcttagtttggaagtttaagtagtgcttaggaaggatatcttttagtatttagaatcaatgctatagaatgacagggtattgatgaaaatgttagccatagaatcaaagtagggtggatgaagtagtgtcaaccatatgatgttctatgtgacaagagtgtaccacagatgctaaaagacaagttttaccaaacgatgattatacctgctatgtagtatggtgtagaatgttggcctataaaaacacattttcaatagacaagaagggattgagttcgaatcatggaatggtgatacacatgataagctaggggtagcaccaattgaagaaaatcttgtctaacacctgttgagatggtttgtaccatggtttttaaagcggtaaggcgctccaaggcgttggaccaccgcctagacgcctaggcggcgcctaggcgacgcctaggcgaggtaggcgggcaaggcgcctaggcgtcagaccaccgcccggacgcctaggcgtcgcctaggcgacgcctaggcgacgccttaaaaacagtggtttgtacatgtccaacagagaactccattagcaccattgtgtagtgacgcgctaataatgggaagagagatggagaaaggctaaagttaatatggaaagaggcattaaaaggagtcaaagatttagtcttgaataagagtgcatggaaaatagctatccatgtgcctgaaacttgacttatggtttatgttgggtttcaacgctagcctatcctaacttgtttgggattaaaaggatttgttgtttcttgaatacgcaggaggtctgcgtatttttatattaagaagaaaaaaggggggggggaccccaaaacagaaacaacagttttacaaactcacaccaccattaacgcctaagacaactcctctaaaaggatttgttgttgtttgcaatagcaatacacagctgttaattttgatgctgacctatttctgataatatattacttttgcattttactttgtgataaacagtttgtcaagaggcgacttcatagtcaagaagccgctgctgcaaatcgcgatggaagatggagaaatcagatgcacaaagcagcacacaatggctgctgtagacgtgctgcacagacacgggctttgtatactgttctgaagaaattacttactcaaaatctttctgttttggttgaaacaatcgaggccccattggtacaacacctattcttacttaatactctctccagttataacaaaagtgtcattttgggttgcctgcagttaatttgtttatactttgatgctttggattgaatatctgaaaataacgcaactagattcttcctggaaagtagttcaaaatataacaactttgttatagtttcatacattttgtagcaatcgaatcatcctattagtacccatgttggtatccaaaattacacttgtgatcggaatacaatattgctgcttgtattatgcttggatatctcttatgcatttattttgacaggttaatgttcttgctgatatggagctttggggaattggcgctgacatggatgcttgtctccgtgcgaggcatattataacaaaaaagctgaaggaactagagaaagaagcttacagattggcaggcaagaatttctctctaaatgctactgctgatatcgcagacattctatatacacacctaaaattgccagttccaaaaggctgtgagaaagggaagctgcatcctagcactgacaagcagtctttggaccacctaaggtattttttcattttccttgttagttctgacatcaaacatgttatttctagttctttggaagtacttgtgtgccactttatgtccgtgcattatggatggaaaattttaaatgtgttagcatatctagtgtctagtcactgatggtctattggtagttttgtgtgagtaaaggtaaattattatgttgtcttgatcagagctagaaaagtgcttgtggaccaccggccacatgttattggcagttaatctctggacatgcttttagaatatcattgtgctaatatgcactctttttctgttttttttggagtcaattaacaggattaactcatttttcatccctaattaaatacacgcatgcatgttcaaataatatcttcaatttggaaaagcttatgccaaagagaagcacatgtatcactgctttactgtattttcagtatataggctgctgctgatgtccttattgtatgcactcggaagatcggtagcaaggcaacactacaacagccttgccaagctggtcttcctttcgtttgaaatctatggcactcttttgatttcacttggccccaaattttcctcgacataaaattgccgtggctttatagtttactataaaatccttatcaactggacataatgctctctttaggcttctattaattatcccagtaatgtaggagaatttaatttgaccattttgctaaaatatttttgaattcttctgtttcctcagggatcaacaccccattatcccattaattaaggaacacagaacattagcaaaactgttaaatggcacgttgtggtccatttgttcacgtgctcaattgtgcactcaatcacaaaggtacatcatacatggaaattggcttcagacgtcaactgccactggccgtttgtccatggaggagccaaatctgcaggtcctttagttgtaataaatgctttgcatgttttgtttggatttcagttattgagaaataacctactgacttaacctgttactatgtagtgtgttgagcatgtggtggaattcgatacagggaaaagcgataaagattactcaagcatgtcagttgatgatcatcataaaatcaatgcccgtgattttttcatacctaccaaggtttttctcatttcacttttatgtatttattaagttttccctttaattaggacagttgactattttcctgtaacaacgctttatttaatatcatgatttacttattttgtaggagaactggttattcataactgctgattactcacagattgagttgcgtttaatggctcacttttctaaagatcatatgttggttgaacttctaaagaaacctgatggtgacgtttttaccatgattgcttcaagatgggctgagaaagaagaggccttgatttcttccaaagagagagaaaacactaaaagattcatatatggcatcctttatggaatgggtgcaaactcccttgcagaacaacttcagtgcagcactgaggaagctgcacagaaaattcaaagctttaggagattttttcctggtgtttcctcatggttacatgaagttgtgttatcctgtcgccaaaaagggttagtctacttggtagcaatttctgtttagtctttctttttatataatattgctcctttgatttttgatgctaacattgaatgagctctgtgaaaaatatgttagtcttaacttttgtggtatttcatatctgaacttttgagatatttcatatttgagcatgtattatcatatctttcaatgttagtatgcgagctgcttctcataataatttaaggtgaatatgcttcatgataatttgattttatttgaatgttaagtttatacagtaaatgataaggattactgtcttttggtcatgttatttatataacgactacttaagatcagagctcctttatctgttgggttgacatatgcacttgtagcccatattgctcatgagattgtatatatattgtcgtatccactactagcggtcttacgaaaccccaaggttactaaagccatggattagagtttgggataactttcaaatgcactcatgattcaattttctttttacctggtttgtgccgatcagaattaatgtctgcgcccttcttcagtttgttgtggcctaacttgtgaaacccttgctatctcacaacttccatctgttagacaatttattttcttccctagttacgaggatttcttctctgattatgtgccagcagttgtttcctccgtacgtagctgtccttgattaggtgtggacaattggttccttcctccctggctgtttccttttagcgcccagatcatctccccgattattgtttccatgaaatcaggtggagcacgttctggtagaggcctattgttctcctgctatttagttgaatataagcaacatttcgcgctattatggcatcaagagattgttacgatcccgtgagaactcgcttttggtaatacttgcttgcccacgtcgcctccccgatgttgtgccgtcatgccacctagtgaccctctgcccgttttccggtgaccaacaacataccgaggatgcagccacataggagaaggcctgctagatccttatcgttgctgccgatgaggctgtcaaggccgtcactgccgcctaggatcatggccgcacaacccaggacgctctcgcgagggaacgctaggctgctaccggtctcaagcgtgctaaggccgctgctcgtgacgctgccttccctcctctcaacgacgaccctgatgatgacgccgacgctagtgaagacttcaattatgaggccgctaccgcctccaacctccacgtggaggccgtgggcgtacagaacctccatgcccttgtgcctgtggttctggacatcctctccacccactacagtcgctgcgggatctcgtcctcctcgccctcgagcggtatgccgtcgccgaccatgtcctcttcgacgccctatttgtgccatcctatcgacgcatggacatcgtcgtcttgtcatgggtgttgtgcacgctctccctgagtttgagttcgctcgcacccccggcggcacaacacaccacacctggatcgttgttgaggagcaattcctcggtaatcgtgaagctcgcgcccttcatcttgacgccaaattctatgtctttatgcatggtgacctctctgtcggtgactactgccacaagataaatgggatggctgacgctctcggtgatctcggagtggttgttcgtggccgcatcctcattctcaacgtgctacacagcttgaacgagaaattaaaccacatgaaggtccactttcatgcactccaagctgctaccttccttcgtctgcaacgacctcatcctcgaggagattgactacaacgcatcaacaccgccaccagcagccgcccttgttgctgtgcatggcctttcggtagctctgcttcccctagcgtcccctcttctgggggcttagctgcgcccctgtcccacccacggcgccctccggtagcatctccactggtgccgacagctattagtagctaccgtcgtcgttgcgacaacggtggcgttgaaggcaaggccatggttccctagcctttgatctacaactcgtggaccgagttagtcaccatgtggcctggccccacatgtgggccacaagaccgtggtggccaaacgccgcgcgcgcccatgcctcaggccacgcaacaacagttgacaacaacatgactagttcgtggtcatgtcgtttggcttgaggaatgcgttaacatcattctagtcccccttgagaattgaatagcactcctagctgacaccatggactcatcgcactcttcatgggttgcttggcctcacgggcttctaccgcttcttcatcaacaactacgacatcatcaccacaccatgaacatccctcaagcgtgttgccttccagtgtgctgatgtggcgactacatcctttgaggccttcaaggcggccctcacctatggactggtgctgcagttgttgagcatcacggcttcgtccatcatcgattgcgattcttcgggcattggttttggcgtgctcttgcccgatcgccttgtttagtctgtggatggagccccagcctaccaaacttgccacctaagagcgcgagctcattggccttgtgaaggctgtgcggcactagaggtcgtatgtctgggaccggccagtggagatagaagattgggtccctaatgatttctcccctactagaatactgcaacagaacctttgaatcttttagtcctgaacaagttgtgcaggctagtttcgaaatgcaacaagggaccacaatatcgatgatacagctaggcatacatcaaagaagtttctaattcgttatcactcctcagatttgttgagactttattaggccggcgacgtgttcttacaaaaataacggctggcaatagcaaagagaaagctaaagcacagaggcaagcagtaaattctatttgccaggtaatatagcattctcacatagttttagatggttgattttattgattatatgattaatatgcatgtgtttccagggttctgctgctgatattattaaggtggctatggttagagttcattcaataattactaacagaactagtgcaactgattccacagatgaagttacaaggaaattttcagaacttggtggccagtgtcaccttattttgcaggtgttttaagacttgcattgcatgatacttattttcttttgacttttgctcagtttggctctaaatatggatgaatgcaactatatatttttcatttgtaggtgcatgatgagttggtattagaagttgatccgtgcatggtagcacaggctggaaggttgttacagatatgtatggaagaagcagcttcactattgggtatcagttttaatctaaacttcgatagttatcttatgttcagtctttgggagcatcttgaaaaggtctttaaaatttacctgctaaactaatagttatgccaagtgaacaaaatgaataggaagttctatttctgccgttctccaatagttaggttcttaaaactaacaacctgggcaggagggtatggggggagcacgcaaaaactgcggaggaggaggcacaaatagtagatatgacnnnnnnnnnnnnnnnnnnnnnnnnnnnnnnnnnnnnnnnnnnnnnnnnnnnnnnnnnnnnnnnnnnnnnnnnnnnnnnnnnnnnnnnnnnnnnnnnnnnnnnnnnnnnnnnnnnnnnnnnnnnnnnnnnnnnnnnnnnnnnnnnnnnnnnnnnnnnnnnnnnnnnnnnnnnnnnnnnnnnnnnnnnnnnnnnnnnnnnnnnnnnnnnnnnnnnnnnnnnnnnnnnnnnnnnnnnnnnnnnnnnnnnnnnnnnnnnnnnnnnnnnnnnnnnnnnnnnnnnnnnnnnnnnnnnnnnnnnnnnnnnnnnnnnnnnnnnnnnnnnnnnnnnnnnnnnnnnnnnnnnnnnnnnnnnnnnnnnnnnnnnnnnnnnnnnnnnnnnnnnnnnnnnnnnnnnnnnnnnnnnnnnnnnnnnnnnnnnnnnnnnnnnnnnnnnnnnnnnnnnnnnnnncccccccccccccccaaaaaaaaaccaaaaaaagggagctgttctaagaagcccatggagatgctctaaccaaggtaaaactgaattggtgtttgcttttatttcagtacctttgcgcacaaagataaaggtgggaaaaacttggggttcactagaaccattctatcctgagccttgttgatgcaaatggttaatgtcagttggatgccaatgtttcacgacatgcaaggtcctggaagaaggctgaacaatttccaatatgccccacagggaccttggtaaatcctactcttttttatagaagattcaccccctgcagagttaatctcatgaggcctgctatttgccactatcgtttcttgttctgcattgtccatgtatttaactgatgcataccttgaaccatatatgaccatatatccgtgtgtggctttgctaatcttgtattttgaatttagtttacattttcatcttcacggtctctttgaaacttcaaatgaatcaggtgattctgtctggtgttcttcggtagaaccttcattgctatgtctacagtcttctgtcattgctgaccgtatgtgaaatcaacgcaacagcgaccagctccattactgaggatttgctatggactggtgattatcattatgattccatgtggcatgcaagaagcatatatatatatatcaccaatagatgctgttaaagggtttaaggtgtatttgaaaggtcttcctagttatactgcgaatcttttagataaacccttaagaaattggagggcctagtatatggtgatttttcttttgctaggtccagcgctaaaaaaccgattatggggtttattcaaagatgaaatttcatcctgtaactacaggttcaaggtgtatttggtttgatggatatcactatggacaagcgatggttggtttttgtacaagttggatgttgataaaaatgttggtatccatgccacacaaaaaaagcctaaccagcacccatattttgtaatccttgtcaagtatgttatatggtttacttgatagctctagcgaggctatccagtacctcaccttcaccctcatatttgtaatccttgtccacataattattagtatgttatatggttatttagtaattacgatggaaatatta

SEQ ID NO: 39 - DNA, 138 bp, Artificial Sequence
  marker ma61227s10
agaagcggagtgcgtcccagtcattcttggttccttgtgacaacgactatgtcaagaagcagygagttgcccattgtggtggctttgaagctctaaaggttggatcaagatacactatccatccatctttagcatcgt

SEQ ID NO: 40 - DNA, 72885 bp, Artificial Sequence
  genomic DNA of mutant pol theta (c->t at position 859)
  misc_feature (5583)..(5733): n is a, c, g, or t
  misc_feature (31155)..(31650): n is a, c, g, or t
  misc_feature (44470)..(44479): n is a, c, g, or t
  misc_feature (45143)..(45152): n is a, c, g, or t
  misc_feature (46993)..(47109): n is a, c, g, or t
  misc_feature (53299)..(53398): n is a, c, g, or t
  misc_feature (71287)..(71733): n is a, c, g, or t
gcccagcaattcaaaagaaaccgaacacccttccggaaattccctctggcaatggcgtcgggctcgtctcgcccccaaatcgaccaggtaaaaccctaacctagttcctcgcctattcacttcgtcgcctccaagcgctaattcttcctgcgttccggctccatctcagttcttcccggccaagaagcggaggccctcgtcgcggaagggcgagtcgccgcgacccgggacgcagcatgagagccccggcggcgccaaggggtccctggaagggtacctcgtccgttcgccttgcaaccgtgccgtggcagcggcatcggtggtccccgtgggctcgcccaggggcggggacccgggcgccaggcgtagcctctcggccgcaatggatgtcgacgtcggttcctcggcttcggtggctgcggcggcaggtgacggggcagactttgatctcaggaggagcacggcggatttcttgtcccattcctgcaggtgagcgcgcacagtgtgaaacataaggggagttatagtattggttccaataactgttattttgcaagttacgggtctaattttgttgttccagtgctatcctgcctttgaggggtgactgtgattacagcgagcagtgccagatgaagcagaagcggagtgcgtcccagtcattcttggttccttgtgacaacgactatgtcaagaagcagcgagttgcccattgtggtggctttgaagctctaaaggttggatcaagatacactatccatccatctttagcatcgtcatatgataagtgatttcatgagtttcaactcttagtttggttctttgcaggagttagatgataatgtagcttccatgaagtaatgcatcaatcaccatggtggctcagaggctgtggaggtttagttatgcctgaacaagtcaaacctggaaccgtttctttgttttcctcttttccttttgaacttctcattatttccttttcatcaggaatctgttgagggggaacatgtgagttgtgttgggttttcggccttgcaaagatgtagctttaccccaagtactgcacagataaaagttgggttttctctagcacctgtggaaaccctaaagtctgtatcgaggaattcccttacttcacctggtgaggagttctggaatgcagcaattgaactcgctgatgggatatctgcccaggctgataaggtccgtggaaggccagaatttgatgcagcagaagacaagtcatcttgtgcagtagcagcattctttaagactcttcctagatcaggaagggatgagcttgactgtcaaaacacagtaggcagcaatgatacacatcatatagagaaattgtcaaataaagttgaatcactggcagtaaactgtcagcatataattagctcacctttgcctgtgaagcagctagatttctttcatgaggatgatattaaagtttcaggttcaaaatttgaaacaaaaggcagctatgaaacttgtaatgcacaagcagaccgtgttccactgaaaggcagtggccgcctagaaaaggaaaatctcatggaccctgtggatgtgatgaagagaagtgctattaatttgcacactgattctgcagccatgagatgtcagggtgttttcaagtcaacaactgaagggaaggttcatccaactcaagaggctggaagagattctaatcttattaggagagatctcaatcagccaacccacaatgaaaataaatcacttgctgcatattcaaataatcgcaagacttggatagattccaagagtaaagttgcttctcaggaagtggaagctagcacacctactagctccattcctctaaaggatcactcaaagatatcaagttggcttcctcctgacctttgtgctatatacatgaaaaaaggcatttcagagctgtacccttggcaggttaaggttcttttctctaattatctatttaatgaatctctggcagctagccttctttcgtctggccatttttgcctatgtatttttttctccagccatgcaaactaccactgccctctctactagtaggattaccaattatttttgctcgtaagctaagcttctttagtatttgtatcgtaataagtatgtcttgaaaactagtacttagtatatcaagtgctgagatggtttgtacatgtccaatagagaccttttagaggcaccagtgcatattagtattataaaacattaaaacgtgatagtaatgggaagaggtagggaaaggccaaacttgatatggaaagatgcaataaaaggagacttaaaatgatgaaatatatctaaagatttagtcttcaatatgattatgagtgcatggaaaacaactattcacgtgcctaaccttgatttgtggcttgtgttgggtttcaactctagtctacactcacttgcttggtactaaaaggctttgttgttattgttgattcatataaaatgctaagtcttctcttgtattgctgtcatcacattcttttcacgtttttaatgcgtttttgcttcatttttctcgaatattgtaatgctctcctagatctgtctgaaggcatgtttggtttgtgcccccactatgctaaaccaaatttggcaatagaagaaaccatgacatggccttttgtaacaccccgtccaatccctggaccggcggtacttactcctggtagctctctagaatcatatattgtccccacagaccaacacaagtcttttatgcgcactttgtcctcactcatgcgcacccgagaaaacttcccagtcggtcacccatcccaaattgctccaagccaagcacgcttaacttggaggttcttttgagataggcttcctaaaaagaagatgcaccttgttgatatggttactctattaattctattaagccttgggccaggatatcccatcccaggggccaggatatcacaattcaccccccttagaagaccgatgtcctcgtcggtcaaccccaatccaggaacctcccctcttagccacgtctgtgtgtctagtgtcgtcatatgccatgccatgtgaccactctgggcccacatgcgccatgcgccatatacccaaaccacctagcccacacacgcccgtgaaacatcgagggtcggctctgataccacttgtaacaccccgtccaatccttagaccggcggtacttactcctggtagctctctagaatcatatattgtccccacagaccaacacaagtcttttatgcgcactttgtcctcactcatgcgcacccgagaaaacttcccagtcggtcacccatcccaaattgctccaagccaaacacgcttaacttggaggttctttcgagatagacttcctaaaaagaagatacaccttgttgatatggttactctattaattctattaagccttgggccaggatatcccatcccaggggccaggatatcacacctttaggcaggtacaagatttgaattggattattggagccaaataaatttacataaatatctacctaactaaaaggaacaatgtttcttgttgccccttccacccaatgataggtggacccaaggtaatcctgcgtctcttatgtcaggtcagcactctctcgctaagagccatttgttcatgattgaatagccaagtgagatggccaccatcctcgaggtcatgttttcggacctaggatgtcaggccgaatgtgttctggttcttggagttgtattttgtttcttttaatataagccgttcggttgcataggccaaaagagcagtttgaggccaaatgaaattttagcggcgagagctgtctcactgagttgtgagtttgaagcagtctttccgcatttgcgcggggggggggtgatggaataagtcttgagcatctagaggacagcctgcttttgactgtcctctgtagtcctttagcatctagaggacaacagtcgctttttgactgtcctctgtagtctctttagcatctagaggacaacaatcgcttttgactgtcctctgtagtcgctttagcatctagaggacagcagtcgctttttgactgtcctctgtagtctctttagcatctagaggacaatcctgttgtgtagtgtgtgtgagaaggtgtggtagtgcagcccctagggctataaatatgtgtccccaacctctctaagggtatgacattgtgtagtgtttgaggaaataaacagaaaattgccccaactcatagtgtcatcctcttgatgagagttagagtccctctacttacaattggtatcagagccaaactatcctgcagcctaaacatatcgtgctcatctccttctcgcgtctctccccacactcagtcggcagcaagagctccaactgttccttcctcccctgctcagacgagcagcctttcgtctgagacagcctcttccacacgcagcaacccctcactagcccaccatgtccctacgctcggccacttcgagtgcgcggcgccagcaggaggccgaggtcgccgcggcacaagaacgcgagcgagcagcagcagcggctgcagcgacagcggcgagggcagcacggttggcggcggcggaactggcagcggcgagagcggaagtagaagcagcggaggcggcggatgctgcacgtgcggcggcaacagagctcgaggttctgcgcggcagtagagctggcagctctgcttctgtcgacgacaacaccgacgaagagctcaggctggcgagggaagcagcgcgagagcaggcggcatagtgggcagccgcgcatccccatgggggcgcgcgtggcggcagcccggatacgcgctgacggcgctctaggcggaggcgcacgcggcggcagcccagacgggcgtagacgcgccggcggtgctcccggcggcggcgaccgagtcgacggagatcgcggcctctacaggcggcgcggttctccctccccggatcggtaccatggtcgccgcatggcccaggccattgtcagggacatcggtcccggcggtggggggcctaccctcaccaagaccaactacgtcgagtgggccgcggtgatgagggtacggctccaggttcgccacatgtgggaagcagttcgttacgacgacgtcgactaccacgaggatcggcgggcgctggatgctctcattgctgtagtcccgcccgagatgcagttttcgctttcccagaagcggactgccaaggaggcctgggacgccatcgctgcgacccgcatcggcagcgatcgtgcccgcaagaccacactgcaggcacttcgcaaggagtgggagaacctggccttcaagccaggtgaggatgttgatgactttgctctccgcctcaacactctgttgcagaagatggtgcagttcggcgacgacacctacgatgaggagagagctgttgagaagctcttccgttgcatccccgagaagtacaggcagattgctcgctcgatcgagtctctgctagacctctccacgatgacgatcgaagaggcgattggtcgcctcaaggtggtggatggcgacgaaccacaggctctctctgggcctatcactatcggcgggnnnnnnnnnnnnnnnnnnnnnnnnnnnnnnnnnnnnnnnnnnnnnnnnnnnnnnnnnnnnnnnnnnnnnnnnnnnnnnnnnnnnnnnnnnnnnnnnnnnnnnnnnnnnnnnnnnnnnnnnnnnnnnnnnnnnnnnnnnnnnnnnnnnnnnncagggtgacaagaagaagggggagtcctcctcctcgacacgaggccgcaaacgcggcaagccgcgcaagccgcgtggaggcgcccaggccggggcgcgaggacatgctgagggtggtgcacgtggaggtgcccaaggcggcgccgtcggcaacaagaagccggcacgcgacgacggctgccacaactgcggcaagcttggccactgggccagggattgtcggcagccacgacgtggccaggccaacgtcgcacaagcagaggcggaggaggaggccctgctcctggcacatgcaagcatcgagccatctccagcggcaccggccgcagcggcactcctccaccttgatgagtcgaaagcacgcgctttcctcggcgacggctccaacaaggacatgatcgaaggatggtgcctcgacaccggcgccactcatcacatgaccggccgacgggagttcttcaccgagcttgactctagcgtccgaggctccgtcaagtttggggacgcctccggtgtagagatcaagggcgccggctcagtcgtcttcaccgccacgtctggtgagcacaggctgctcaccggagtctactacatccccgcgttgagaaactctatcatcagtttgggacagctggatgagaacggttcgcgcgtggaggtcgagcacggagtcatgaggatctgggatccctctcgtcgccttcttgccaaggtacgcaggagtgcaaatcggctttacatcctcaatgtgaaggtggcacaaccttgctgccttgctgctcgtcgagacgacggggcatggcagtggcacgagcgcttcgggcaccttaacttcgaagccttgaagcggctcagcgccaaggagatggtacgaggcctgccgtgccttgaccatgtggagcaattctgcgatgtctgcgtgttgacaaagtagagactgctccccttcccccagcagtcgagcttccgagccaaggagaggctcgagctcgtgcatggggacttgtgtggcccggtgacaccagccacaccaggaggacgacgctacttcttgctgctcgtcgacgatctctcccgctacatgtgggtgatgatccttggcagaaagggagaggctgcgaacgccatcaggcgtgtgcaggtcgctgcggaggcggagtgcggccgcaagctgtgatggaataagtcttgagcatctagaggacagcctgcttttgactgtcctctgtagtcctttagcatctagaggacagcttgactgtcctctgtagtctctttagcatctagaggacagcagtcgctttttgactgtcctctgtagtcgctttagcatctagaggacagcagtcgcttttgactgtcctctgtagtctctttagcatctagaggacaatcctgttgtatagtgtgtgtgagaaggtgtggtagtgcagcccctagggctataaatatgtgtccccaacccctctaagggtatggcattgtgtagtgtttgaggaaataaacagaaaattgccccaactcatagtgtcatcctcttgatgagagttagagtccctctacttacaattggtatcagagccaaactatcctgcagcctaaacatctcgtgttcatctccttcccgcgcctctccccacactcagtcggcagcaagagctccaactgttcctccctcccctgctcagacgagcagcctttcgtctgagacagcctcttccacacgcagcgacccctcactagcccgccatgtccctacgctcggccacttcgagtgcgcggcgccagcaggaggccgaggtcgccgcggcacaagaacgcgagcgagcagcagcagcggctgcagcgacagcgacgagggcagcacggttggcggcggcggaactggcagcggcgagagcggaagtagaagcagcggaggcggcggatgctgcacgtgcggcggcaacagagctcgaggttctgcgcggcagtagagctggcagctctgcttctgtcgacgacaacaccgacgacgagctcaggctggcgagggaagcagcgcgagagcaggcggcacagtgggcagccgcgcatccccatgggggcgcgcgtggcggcagcccggataggcgccgacacgctgacggcgctccaggcgggggcgcacgcggcggcagcccagacgggcgtagacgcgccgacggtgctcccggcggcggcgaccgagtcgacggagatcgcggcctctacaggcggcgcggttctccctccccggatcggtaccatggtcgtcgcatggcccaagccattgtcagggacatcggtcccgacggtgggtggcctaccctcaccaagaccaactacgtcgagtgggccgcggtgatgagggtacggctccaggttcgccacatgtgggaagcagttcgttacgacgacgtcgactaccacgaggatcggcgggcgctggatgctctcattgctgcagtcccgcccgagatgcagttttcgctttcccagaagcggactgccaaggaggcctgggacgccatcgctgcgacccgcatcggcagcgatcgtgcccgcaagaccacactgcaggcacttcgcaaggagtgggagaacctggctttcatgccaggtgaggatgttgatgactttgctctccgcctcaacactctgttgcagaagatggtgcagttcggcgacgacacctacgatgaggagagagctgttgagaagctcttccgttgcatccccgagaagtacaggcagattgctcgctcgatcgagtctctgctagacctctccacgatgacgatcgaagaggcgattggtcgcctcaaggtggtcgacggcgacgaaccacaggctctctctgggcctatcactatcggcgggaagctacatctcactcgggagcagtgggaggcctgccagggtgacaagaaggagtcctcctcgacacgaggccgcaaacgcggcaagccgcgcaaggcgcgtggaggcgcccaggccggggcgcgaggacatgctgagggtggtgcacgtggaggtgcccaaggcggcgccgtcggcaacaagaagccgacacgagacgacggctgccacaactgcggcaagcttggccactgggccagggattgtcggcagccacgacgtggccaggccaacgacgcacaggcggaggcggaggaggaggccctgctcctggcacatgcaagcatcgagccatctccagcggcaccggccgcagcggcactcctccaccttgatgagtcgaaagcacgcgctttcctcggcgacggctccaacaaggacatgatcgaaggatggtgcctcgacaccggcgccactcatcacatgaccggccgacgggagttcttcaccgagcttgactctagcgtccgaggctccgtcaagtttggggacgcctccggtgtagagatcaagggcgccggctcagtcgtcttcaccgccacgtctggtgagcacaggctgctcaccggagtctactacatccccgcgttgagaaactctatcatcagtttgggacagctggatgagaacggttcgcgcgtggaggtcgagcacggagtcatgaggatctgggatccctctcgtcgccttcttgccaaggtacgcaggagtgcaaatcggctttacatcctcaatgtgaaggtggcacaaccttgctgccttgctgctcgtcgagacgacggggcatggcagtggcacgagcgcttcgggcaccttaacttcgaagccttgaagcggctcagcgccaaggagatggtacgaggcctgccgtgccttgaccatgtggagcaattctgcgatgtctgcgtgttgacaaagtagagactgctccccttcccccagcagtcgagcttccgagccaaggagaggctcgagctcgtgcatggggacttgtgtggcccggtgacaccagccacaccaggaggacgacgctacttcttgctgctcgtcgacgatctctcccgctacatgtgggtgatgatccttggcagaaagggagaggctgcgaacgccatcaggcgtgtgcaggtcgctgcggaggcggagtgcggccgcaagctgtgatggaataagtcttgagcatctagaggacagcctgcttttgactgtcctctgtagtcctttagcatctagaggacagcttgactgtcctctgtagtctctttagcatctagaggacagcagtcgctttttgactgtcctctgtagtcgctttagcatctagaggacagcagtcgcttttgactgtcctctgtagtctctttagcatctagaggacaatcctgttgtatagtgtgtgtgagaaggtgtggtagtgcagcccctagggctataaatatgtgtccccaacccctctaagggtatggcattgtgtagtgtttgaggaaataaacagaaaattgccccaactcatagtgtcatcctcttgatgagagttagagtccctctacttacaattggtatcagagccaaactatcctgcagcctaaacatctcgtgttcatctccttcccgcgcctctccccacactcagtcggcagcaagagctccaactgttcctccctcccctgctcagacgagcagcctttcgtctgagacagcctcttccacacgcagcgacccctcactagcccgccatgtccctacgctcggccacttcgagtgcgcggcgccagcaggaggccgaggtcgccgcggcacaagaacgcgagcgagcagcagcagcggctgcagcgacagcgacgagggcagcacggttggcggcggcggaactggcagcggcgagagcggaagtagaagcagcggaggcggcggatgctgcacgtgcggcggcaacagagcttgaggttctgcgcggcagtagagctggcagctctgcttctgtcgacgacaacaccgacgaagagctcaggctggcgagggaagcagcgcgagagcaggcggcacagtgggcagtcgcgcatccccatgggggcgcgcgtggcggcagcccggataggcgtcgacacgctgacggcgctccaggcgggggcgcacgcggcggcagcccagacgggcgtagacgcgccggcggtgctcccggcggcggcgaccgagttgacggagatcgcggcctctacaggcggcgcggttctccctccccggatcggtaccatggtcgtcgcatggcccaagccattgtcagggacatcggtcccggcggtgggtggcctaccctcaccaagaccaactacgtcgagtgggccgtggtgatgagggtacggctccaggttcgccacatgtgggaagcagttcgttacgacgacgtcgactaccacgaggatcggcgggcgctggatgcccccattgctgcagtcccgcccgagatgcagttttcgctttcccagaagcggactgccaaggaggcctgggacgccatcgctgcgacccgcatcggcagcgatcgtgcccgcaagaccacactgcaggcacttcgcaaggagtgggagaacatgaccttcaagccaggtgaggatgttgatgactttgctctccgcctcaacactctgttgcagaagatggtgcagttcggcgacgacacctacgatgaggagagagctgttgagaagctcttccgttgcatccccgagaagtacaggcagattgctcgctcgatcgagtctctgctagacctctccacgatgacgatcgaagaggcgattggtcgcctcaaggtggtcgacggcgacgaaccacaggctctctctgggcctatccctatcggcgggaagctacatctcactcgggagcagtgggaggcctgccagggtgacaagaagcagggggagtcctcctcgacacgaggccgcaaacgcggcaagccgcgcaaggcgcgtggaggcgcccaggccggggcgcgaggacatgctgagggtggtgcacgtggaggtgcccaaggcggcgccgtcggcaacaagaagccggcacgagacgacggctgccacaactgcggcaagcttggccactgggccagggattgtcggcagctacgacgtggccaggccaacgtcgcacaggcggaggcggaggaggaggccctgctcctggcacatgcaagcatcgagccatctccagcggcaccggccgcagcggcactcctccaccttgatgagtcgaaagcacgcgctttcctcggcgacggctccaacaaggacatgatcgaaggatggtgcctcgacaccggcgccactcatcacatgaccggccgacgggagttcttcaccgagcttgactctagcgtccgaggctccgtcaagtttggggacgcctccggtgtagagatcaagggcgccggctcagtcgtcttcaccgccacgtctggtgagcacaggctgctcaccggagtctactacatccccgcgttgagaaactctatcatcagtttgggacagctggatgagaacggttcgcgcgtggaggtcgagcacggagtcatgaggatctgggatccctctcgtcgccttcttgccaaggtacgcaggagtgcaaatcggctttacatcctcaatgtgaaggtggcacaaccttgctgccttgctgctcgtcgagacgacggggcatggcagtggcacgagcgcttcgggcaccttaacttcgaagccttgaagcggctcagcgccaaggagatggtacgaggcctgccgtgccttgaccatgtggagcaattctgcgatgtctgcgtgttgacaaagtagagactgctccccttcccccagcagtcgagcttccgagccaaggagaggctcgagctcgtgcatggggacttgtgtggcccggtgacaccagccacaccaggaggacgacgctacttcttgctgctcgtcgacgatctctcccgctacatgtgggtgatgatccttggcagaaagggagaggctgcgaacgccatcaggcgtgtgcaggtcgctgcggaggcggagtgcggccgcaagctgtgatggaataagtcttgagcatctagaggacagcctgcttttgactgtcctctgtagtcctttagcatctagaggacagcttgactgtcctctgtagtctctttagcatctagaggacaacagtcgctttttgactgtcctctgtagtcgctttagcatctagaggacagcagtcgcttttgactgtcctctgtagtctctttagcatctagaggacaatcctgttgtatagtgtgtgtgagaaggtgtggtagtgcagcccctagggctataaatatgtgtccccaacccctctaagggtatggcattgtgtagtgtttgaagaaataaacagaaaattgccccaactcatagtgtcatcctctgatgagagttagagtccctctacttacaattggtatcagagccaaactatcctgcagcctaaacatctcgtgctcatctccttcccgtgcctctccccacactcagtcggtagcaagagctccaactgttccttcctcccctgctcaaacgagcagcctttcgtctgagacagcctcttccacacgcagcgacccctcactagcccaccatgtccctacgctcggccacttcgagtgcgcggcgccagcaggaggccgaggtcgccgcggcacaagaacgcgagcgagcagcagcagcggctgcagcgacagcggcgagggcagcacggttggcggcggcggaactggcagcggcgagagcggaagtagaagcagcggaggcggcggatgctgcacgtgcggcggcaacagagctcgaggttctgcgcggcagtagagctggcagctctgcttctgtcgacgacaacaccgacgacgagctcaggctggcgagggaagcagcgcgagagcaggcggcacagtgggcagccgcgcatccccatgggggcgcgcgtggcggcagcccggataggcgccgacacgctgacggcgctccaggcgggggcgcacgcggcggcagcccagacgggcgtagacgcgccggcggtgctctcggcggcggcgaccgagtcgacggagatcgcggcctctacaggcggcgcggttctccctccccggatcggtaccatggtcgtcgcatggcccaagccattgtcagggacatcggtcccgacggtgggtggcctaccctcaccaagaccaactacgtcgagtgggccgcggtgatgagggtacggctccaggttcgccacatgtgggaagcagttcgttacgacgacgtcgactaccacgaggatcggcgggcgctggatgctctcattgctgcagtcccgcccgagatgcagttttcgctttcccagaagcggactgccaagaaggcctgggacgccatcgctgcgacccgcatcggcagcgatcgtgcccgcaagaccacactgcagacacttcgcaaggagtgggagaacctggccttcaagccaggtgaggatgttgatgactttgctctctgcctcaacactctgttgcagaagatggtgcagttcggtgacgacacctacgatgaggagagagctgttgagaagctcttccgttgcatccccgagaagtacaggcagattgctcgctcgatcgagtctctgctagacctctccacgatgacgatcgaagaggcgattggtcgcctcaagggggtcgacggcgacgaaccacaggctctctctgggcctatcactatcggcgggaagctacatctcactcgggagcagtgggaggcctgccagggtgacaagaagcagggggagtcctcctcgacacgaggccgcaaacacggcaagccgcgcaaggcgcgtggaggcgcccaagccggggcgcgaggacatgctgagggtggtgcacgtggaggtgcccaaggcggcgccgtcggcaacaagaagccggcacgagacgacggctgccacaactgcggcaagcttggccactgggccagggattgtcggcagccacgacgtggccaggccaacgtcgcacaggcggaggcggaggaggaggccctgctcctggcacatgcaagcatcgagccatctccagcggcaccggccgcagcggcactcctccaccttgacgagtcgaaagcacgcgctttcctcggcgacggctccaacaaggacatgatcgaaggatggtgcctcgacaccggcgccactcatcacatgaccggccgacgagagttcttcaccgagcttgactctagcgtccgaggctccgtcaagtttggggacgcctccggcgtagagatcaagggcgccggctcagtcgtcttcaccgccgcgtctggtgagcacaggctgctcaccggagtctactacatccccgcgttgaggaactctatcatcagcttgggacagctggatgagaacggttcgcgcgtggaggtcgagcacggagtaatgaggatctgggatccctctcgtcgccttcttgccaaggtacgcaggagtgcaaatcggctttacatcctcaatgtgaaggtggcacaaccttgctgccttgctgctcgtcgagacgacggggcatggcagtggcacgagcgcttcgggcaccttaacttcgaagccctgaagcggctcagcgccaaggagatggtacgaggcctgccgtgccttgaccatgtggagcaattctgcgatgtctgcgtgttgacaaagcagagacgactccccttcccccagcagtcgagcttccgagccaaggagaggctcgagctcgtgcatggggacttgtgtggcccggtgaccccagccacaccaggaggacgacgctacttcttgctgctcgtcgacgatctctcccgctacatgtgggtgatgatccttggcagaaagggagaggctgcgaacgccatcaggcgtgtgcaggtcgctgcggaggcggagtgcggccgcaagctgtgatggaataagtcttgagcatctagaggacagcctgcttttgactgtcctctgtagtcctttagcatctagaggacagcttgactgtcctctgtagtctctttagcatctagaggacaatcctgttgtgtagtgtgtgtgagaaggtgtggtagtgcagcccctagggctataaatatgtgtccccaacccctctaagggtaatggcattgtgtagagtttgaggaaataaacagaaaattgccccaactcatagtgtcatcctcttgatgagagttagagtccctctacttacaattggtatcagagccaaactatcctgcagcctaaacatctcttgctcatctccttcccgcgcccctccccacactcagtcggcagcaagagctccaactgttccttcctcccctgctcagacgagcagcctttcgtctgagacagcctcttccacacgcagcgacccctcactagcccacgatgtccctacgctcggccacttcgagtgcgcggcgccagcaggaggccgaggtcgccgcggcacaagaacgcgagcgagcagcagcagcggctgcagcgacagcggcgagggcagcacggttggcggcggcggaactggcagcggcgagagcggaagtagaagcagcggaggcggcggatgctgcacgtgcggcggcaacagagctcgaggttctgcgcggcagtagagctggcagctctgcttctgtcgacgacaacaccgacgacgagctcaggctggcgagggaagcagcgcgagagcaggcggcacagtgggcagccgcacatccccatgggggcgcgcgtggcggcagcccggataggcgccgacacgctgacggcgctccaggcgggggcgcacgcggcggcagcccagacgggcgtagacgcgccggcggtgctcccggcggcggcgaccgagtcgacggagatcgcggcctctacaggcggcgcggttctccctccccggatcggtaccatggtcgtcgcatggcccaagccattgtcagggacatcggtcccggcggtgggtggcctaccctcaccaagaccaactacgtcgagtgggccgcggtgatgagggtacggctccaggttcgccacatgtgggaagcagttcgttacgacgacgtcgactcccacgaggatcggcgggcgctggatgctctcattgctgcagtcccgcccgagatgcagttttcgctttcccagaagcggacagccaaggaggcctgggacgccatcgctgcgacccgcatcggcagcgatcgtgcccgcaagaccacactgcaggcacttcgcaaggagtgggagaacctggccttcaagccaggtgaggatgttgatgactttgctctccgcctcaacactctgttgcagaagatggtgcagttcggcgacgacacctacgatgaggagagagctgttgagaagctcttccgttgcatccccgagaagtacaggcagattgctcgctcgatcgagtctctgctagacctctccacgatgacgatcgaagagtcgattggtcacctcaaggtggtcgacggcgacgaaccacaggctctctctgggcctatcactatcggcgggaagctacatctcactcgggagcagtgggaggcctgccagggtgacaagaagaagggggagtcctcctcgacacgaggccgcaaacgcggcaagccgcgcaaggcgcgtggaggcgcccaggccggcgcgcgaggacatgctgagggtggtgcacgtggaggtgcccaaggcggcgccgtcggcaacaagaagccggcacgagacgacggctgccacaactgcggcaagcttggccactgggccagggattgtcggcagccacgacgtggccaggccaatgtcgcacaggcggaggcggaggaggaggccctgctcctggcacatgcaagcatcgagccatctccagcggcaccggccgcagcggcactcctccaccttgatgagtcgaaagcacgcgctttcctcggcgacggctccaacaaggacatgatcgaaggatggtgcctcgacaccggcgccactcatcacatgaccggccgacgggagttcttcaccgagcttgactctagcgtccgaggctccgtcaagtttggggacgcctccggcgtagagatcaagggcgctggctcagtcgtcttcaccgccgcgtctggtgagcacaggctgctcaccggagtctactacatccccgcgttgaggaactctatcatcagcttgggacagctggatgagaacggttcacgcgtggaggtcgagcacggagtcatgaggatttgggatccctctcgtcgccttcttgccaaggtacgcaggagtctaaatcggctatacatcctcaatgtgaaggtggcacaaccttgttgtcttgctgctcgtcgagacgatggggcatggcagtggcacgagcgctttgggcaccttaacttcgaggccctgaagcggctcagtgccaaggagatggtacgaggcctgccgtgccttgaccatgtggagcaattctgcgatgtctgcgtgttgacaaagcagagatggctcccctttccccagcagtcgagcttccgagccaaggagaggcttgagctcgtgcatggggacttgtgtggcccggtgacaccagccacaccaggaggacgacgctacttcttgctgctcgtcgacgatctctcccgctacatgtgggtgatgatccttggcagcaagggagaggctgcgaacgccatcaggcgtgtgcaggtcactgcggaggcggagtgcggccgcaagctgcgcgtgctgcgcaccaacaacggcggcgaattcacgacggctgagttcgcgtcgtactgcgcggatgagggcgttcagcgccactactccgcgccgtacagcccgcagcagaacggcgtcgtcgagcggcgcaaccagacggttgtggggatggctcgggctctcctcaagcagagaggaatgccagctgtcttctggggagaggcggtggtgacagcgggttacatcctcaaccgctcgcccaccaaggctctcaacgggatgacaccgtacgaggcttggcatgggcgcaagccggcggtctctcacctacgggtcttcggctgcctcgcgttcaccaaggagcttggccacatcagcaagctcgacgataggagcaccccgggggtgttcattggctacgcggagggctcgaaggcctaccgcatctttgacccaagaacacagcgtgtgcgcacggcgcgcgacgtagtgttcgacgaagggcgaggttgggcgtgggacaaggcggtggacgacggcacgactccgacgtacgacttcaccatcgagtacgtccactttgagggagctgggggagtaggcaactcttctccgagcaggtctaccccagcccccaagtctccaccgcctccagcgccactctctccagctcctgctacaacgagctcttcaccaccacgcactccagccacgactccggctacagcgagctcttcgccaccacgtactccagcaccgacggtaccctctccgggaacgtcctctccgacaccagctcgtgtcgagcacgacccagtggagctcgtgacccctctgtcccgcgacgaggagcgcgtcgacgcgtgctacgccggcgagccgttgcggtatcgaagggtggagggccttctcatcgacccgtcggtgccaggccctgcatctcgcattctggcaggagagttgcatcttgcatgcgacgatggtgagcctcggtctttcgcggaggccgagcaacatgcggcttggcgtgccgcgatgcagtcggagatggacgcggttgagacgaaccgcacttgggagctcgctgatctccctcatggtcatcgcgcgatcacccttaagtgggtgttcaaactgaagagggatgaagccggcgccatcgtcaagcataaggctcgcttggtggcacgcggtttcttgcagcaggaggggatcgacttcgacgatgccttcgcccctgtagcacggatggaatccgtgcgactccttgcgctggcagccctggagggctggcatgttcatcacatggatgtcaagtcggcgtttcttaacggcgacttaaaggaggaggtctatgtacaccagccgccaggttttgcgatccctggcaaggagggcaaggtgttgcgcctgcgcaaggctctctacggcttgcgacaggcaccaagggcgtggaatgccaagctggattccacgctcaagaggatgggcttcatgccaagcccgcacgaggcggccatctatcgacggggcaatggagaaaatgccctgctggtgggtgtctacgtcgacgacttggtgatcaccggcgccaaggatgcagaggtggcagcgttcaaggaagagatgaaggccaccttccaaatgagtgacctggggcatctctccttctacctggggattgaggtgcaccagggagactccgggatcacacttcgccagaccgcctacgccaagcgcattgttgagctggctgggctcatcgactgcaacccagctctcactccgatggaggagaggctgaagctgagtcgcgacagcacgacgaaggaggtggatgctacacagtaccggcgtcttgtggggagccttcgctacctcgtccacacacggcctgacttggcatactccgtcggctacgttagtcggtttctgcagcgatcgacgacggagcatgagcaggctgtgaagaggatcatccgctatgttgcggggactctcgaccacggtctctactacccgaggtgccctggggaggcacaccttgtcgggtacagcgatagcgaccacgccggcgacatcgacaccagcaagagcacaagcgggatcctcttcttcctcggcaagtgccccatcagctggcagtcggtcaagcagcaggtggtggccatgtccagctgcgaggccgagtacatagcagcgtccactgcttcgactcaggctctctggctggctcgactgctcggtgatctcctcgggagagacactggagcggtggaactcagggtggacagccagtccgctctggcattggccaagaaccccgtgttccatgaacggagcaagcacatccggctgagataccacttcatccgagactgcttggcagaagggagcatcaaggcgtgctacatcaacaccaaggatcagcttgcagacctgctcaccaagccccttgggaagatcaagtttgttgagctttgctccaggtccgggatggcccaactttctcacaagacgacgcccaagacttagggggagaatgatggaataagtcttgagcatctagaggacagcctgcttttgactgtcctctgtagtctctttagcatctagaggacagcagtcgctttttgactgtcctctgtagtcgctttagcatctagaggacagcagtcgcttttgactgtcctctgtagtctctttagcatctagaggacaatcctgttgtatagtgtgtgtgagaaggtgtggtagtgcagcccctagggctataaatatgtgtccccaacccctctaagggtatggcattgtgtagtgtttgaggaaataaacagaaaattgccccaactcatagtgtcatcctcttgatgagagttagggtccctctacttacaagctgcgcgtgctgcgcaccgacaacggcggcgaattcacggcggctgagttcgcgtcgtactgcgcggatgagggcgttcagcgccactactccgcgccgtacagcccgcagcagaacggtgtcgtcgagcggcgcaaccagacggttgtggggatggctcgagctctcctcaagcagagaggaatgccagctgtcttctggggagaggcggtggtgacagcggtttacatcctcaaccgctcgcccaccaaggctctcaacgggatgacaccgtacgagacttggcatgggcgcaagccggcggtctctcacctacgggtcttcggctgcctcgcgttcaccaaggagcttggccacatcagcaagctcgacgataggagcaccccgggggtgttcattggctacgcggagggctcgaaggcctaccgcattcttgacccaagaacacagcgtgtgcgcacggcgcgcgacgtagtgttcgacgaagggcgaggatgggcgtgggacaaggcggtggacgacggcacgactccgacgtacgacttcaccatcgagtacgtccaatttgagggagctgggggagtaggcaactcttctccgagcaggtctaccccagcccccaagtctccaccaactccagcgccacactctctagctcctgctacaacgagctcttcaccaccacgcactccagccacgactccggctacagcgagctcttcgccaccacgtactccagcaccgacggtaccctctctgggaacgtcctctccgacaccagctcgtgtcgagcacgacccagtggagctcgtgacccctctgtcccgcgacgaggagcgcgtcgacgcgtgctacgccggcgagccgttgcggtatcgaagggtggagggccttctcatcgacccgtcggtgccaggccctgcatctcgcattctggcaggagagttgcatcttgcatgcgacgatggtgagcctcggtctttcgcggaggccgagcaacatgcggcttggcgtgccgcgatgcagtcggagatggacgcggttgagacgaaccgcacttgggagctcgctgatctccctcatggtcatcgcgcgatcacccttaagtgggtgttcaaactgaagagggatgaagccggcgccatcgtcaagcataaggctcgcttggtggcacgcggtttcttgcagcaggaggggatcgacttcgacgatgccttcgcccctgtagcacggatggaatccgtgcgactcctcctcgcgttggcagccctgaagggctggcatgttcatcacatggatgtcaagtcggcgtttcttaacggcgacttaaaggaggaggtctacgtacaccagccgccaggttttgcgatccctggcaaggagggcaaggtgttgcgtctgcgcaaggctctctacggcttgcgacaggcaccaagggcgtggaatgccaagctggattccacgctcaagaggatgggcttcatgccaagcccgcacgaggcggccatctatcggcggggcaatggaggaagtgccctgctggtgggtgtctacgtcgacgacttggtgatcaccggcgccaaggatgcagaggtggcagcattcaaggaagagatgaaggccaccttccaaatgagtgacccggggcacctctccttctacctggggattgaggtgcaccagggggactccgggatcacacttcgccagaccgcctacgccaagcgcattgttgagctggctgggctcaccgactgcaacccagctctcactccgatggaggagaggctgaagctgagtcgcgatagcacgacggaggaggtggacgctacacagtaccggcatcttgtggggagccttcgctacctcgtccacacacagcctgacttggcatactccgtcggctacgttagtcggtttctgcagcgaccgacgacggagcatgagcaggctgtgaagaggatcatccgctatgttgcggggactctcgaccacggtctctactacccgaggtgccctggggaggcacaccttgtcgggtacagcgatagcgaccatgccggcgacatcgacaccagcaagagcacaagcggaatcctcttcttcctcggcaagtgccccatcagctggcagtcggtcaagcagcaggtggtggccatgtccagctgcgaggtcgagtacatagcggcgtccactgcttcggctcagacgctctggctggctcgactgctcggtgatctcctcgggagagacactggagcggtggaactcagggtggacagccaatctgctctggcattggccaagaaccccgtgttccatgaacggagcaagcacatccggctgagataccacttcatccgagcctgcttggcagaagggagcatcaaggcgcgctacatcaacaccaaggatcagcttgcagacctgctcaccaagccccttggtaagatcaagtttgttgagctttgctacaggtccgggatggcccaactttctcacaagacgacgcccaagacttagggggagaatgatggaataagtcttgagcatctagaggacagcctgcttttgactgtcatctgtagtcctttagcatctagaggacagcttgactgtcctctgtagtctatttagcatctagaggacagcagtcgcttttttgactgtcctctgtagtcgctttagcatctagaggacaacagtcgcttttgactgtcctctgtagtcgctttagcatctagaggacaatcctgttgtgtagtgtgtgtgagaaggtgtggtagtgcagcccctagggctataaatatgtgtccccaacccctctaagggtatgccattgtgtagtgtttgaagaataaacagaaaattgccccaactcatagtgtcatcctcttgatgagagttagagtccctctacttacagagccatctccagcggcaccggccgcagcggcactcctccaccttgatgagtcgaaagcacgcgttttcctcggcgacggctccaacaaggacatgatcgaaggatggtgcctcgacaccggcgccactcatcacatgaccggccaacgggagttcttcaccgagcttgactctagcgtccgaggctccgtcaagtttggggacgcctccggcgtagagatcaagggcgccggctcagtcgtcttcaccgccgcgtctggtgagcacaggctgctcaccggagtctactacatccccgcgttgagtaactctatcatcagcttgggacagctggatgagaacggttcgcgcgtggaggtcgagcacggagtcatgaggatctgggatccctctcgtcgccttcttgccaaggtacgcaggagtccaaatcggctatacatcctcaatgtgaaggtggcacaaccttgctgccttgctgctcgtcgagacgacggggcatggcagtggcacgagcgcttcgggcaccttaacttcgaagccctgaagcggctcagcgccaaggagatggtacgaggcctgccgtgccttgaccatgtggagcaattctgcgatgtctgcgtgttgacaaagcagagacgactcccctttccccagcagtcgagcttccgagccaaggagaggctcgagctcgtgcatggggacttgtgtggcccggtgacaccagccacaccaggaggacgacgctacttcttgctgctcgtcgacgatctctcccgctacatgtttgtgatgatccttggcagcaagggagaggctgcgaacgccatcaggcgtgtgcaggtcgctgcggaggcggagtgcggccgcaagctgcgcgtgctgcgcaccgacaacggcggcgaattcacggcggctgagttcgcatcgtactgcgcggatgagggcgttcagcgtcactactccgcgccgtacagcccgcagcagaacggcgtcgtcgagcggcgcaaccagacggttgtggggatggctcgggctctcctcaagcagagaggaatgccagctgtcttctggggagaggcggtggtgacagcgggttacatcctcaaccgctcgcccaccaaggctctcaacgggatgacaccgtacgaggcttggcatgggcgcaagccggcggtctctcacctacgggtcttcggctgcctcgcgttcaccatggagcttggccacatcagcaagctcgacgataggagcaccccgggggtgttcattggctacgcggagggctcgaaggcctaccgcattcttgacccaagaacacagcgtgtgcgcacggcgcgcgacgtagtgttcgacgaagggcgaggatgggcgtgggacaaggcggtggacgacggcacgactccgacgtacgacttcaccatcgagtacgtccaatttgagggagctgggggagtaggcaactcttctccgagcaggtctaccccagcccccaagtctccaccaactccagcgccacactctctagctcctgctacaacgagctcttcaccaccacgcactccagccacgactccggctacagcgagctcttcgccaccacgtactccagcaccgacggtaccctctccgggaacgtcctctccgacaccagctcgtgtcgagcacgacccagtggagctcgtaacccctctgtcccgcgacgaggagcgcgtcgacgcgtgctacgacggcgagccgttgcggtatcgaagggtggagggccttctcctcgacccgtcggtgccaggccctgcatctcgcattctggcgggagagttgcatcttgcatgcgacgatggtgagcctcggtctttcgcggaggccgagaaacatgcggcttggcgttctgcgatgcagtcggagatggacgcggttgagacgaaccgcacttgggagctcgctgatctccctcatggtcatcgcgcgatcacccttaagtgggtgttcaaactgaagagggatgaagtcggcgccatcgtcaagcataaggctcgcttggtggcacgcggtttcttgcagcaggaggggatcgacttcgacgatgccttcgcccctgtagcacggatggaatccgtgcgactcctcctcgcgctggcagccctggagggctggcatgttcatcacatggatgtcaagtcggcatttcttaacggcgacttaaaggaggaggtctacgtacaccagccgccaggttttgcgatccctggcaaggaaggcaaggtgttgcgcctgtgcaaggccctctacggcttgcgacaggcaccaagggcgtggaatgccaaactggattccacgctcaagaggatgggcttcatgccaagcccgcacgaggcggccatctatcggcggggcaatggagaaaatgccctgctggtgggtgtctacgtcgatgacttggtgatcaccggcgccaaggatgcagaggtggcagcattcaaggaagagatgaaggccaccttccaaatgagtgacccggggcacctctccttctacctggggattgaggtgcaccagggggactccgggatcacacttcgccagaccgcctacgccaagcgcattgttgagctggctgggctcaccgactgcaacccagctctcactccgatggaggagaggctgaagctgagtcgcgatagcacgacggaggaggtggacgctacacagtaccggcgtcttgtggggagccttcgctacctcgtccacacacagcctgacttggcatactccgtcggctacgttagtcggtttctgcagcgaccgacgacggagcatgagcaggctgtgaagaggatcatccgctatgttgcggggactctcgaccacggtctctactacccgaggtgccctggggaggcacaccttgtcgggtacagcgatagcgaccatgccggcgacatcgacaccagcaagagcacaagcggaatcctcttcttcctcggcaagtgccccatcagctggcagtcggtcaagcagcaggtggtggccatgtccagctgcgaggtcgagtacatagtggcgtccactgcttcggctcagacgctctggctggctcgactgctcggtgatctcctcgggagagacactggagcggtggaactcagggtggacagccaatccgctctggcattggccaagaaccccgtgttccatgaacggagcaagcacatccgactgagatagcacttcatccgagcctgcttggcagaagggagcatcaaggcgcgctacatcaacaccaaggatcagcttgcagacctgctcaccaagccccttggtaagatcaagtttgttgagctttgctccaggtccgggatggcccaactgtctcacaagacgacgcccaagacttagggggagaatgatggaataagtcttgagcatctagaggacagcctgcttttgactgtcatctgtagtcctttagcatctagaggacagcttgactgtcctctgtagtctctttagcatctagaggacagcagtcgcttttttgactgtcctctgtagtcgctttagcatctagaggacaacagtcgcttttgactgtcctctgtagtcgctttagcatctagaggacaatcctgttgtgtagtgtgtgtgagaaggtgtggtagtgcagcccctagggctataaatatgtgtccccaacccctctaagggtatgccatagtgtagtgtttgaagaaataaacagaaaattgccccaactcatagtgtcatcctcttgatgagagttagagtccctctacttacagagccatctccagcggcaccggccgcagcggcactcctccaccttgatgagtcgaaagcacgcgttttcctcggcgacggctccaacaaggacatgatcgaagaatggtgcctcgacaccggcgccactcatcacatgaccggccaacgggagttcttcaccgagcttgactctagcgtccgaggctccgtcaagtttggggacgcctccggcgtagagatcaagggcgccggctcagtcgtcttcaccgccgcgtctggtgagcacaggctgctcaccggagtctactacatccccgcattgagtaactctatcatcagcttgggacagctggatgagaacggttcgcgcgtggaggtcgagcacggagtcatgaggatctgggatccctctcgtcgccttcttgccaaggtacgcaagagtccaaatcggctatacatcctcaatgtgaaggtggcacaaccttgctgccttgctgctcgtcgagacgacggggcatggcagtggcacgagcgcttcgggcaccttaacttcgaggccctgaagcggctcagtgccaaggagatggtgcgaggcctgccgtgccttgaccatgtggagcaattctgcgatgtctgcgtgttgacaaagcagagacggctcccctttccccagcagtcgagcttccgagccaaggagaggctcgagctcgtgcatggggacttgtgtggcccggtgacaccagccacaccaagaggacgacgctacttcttgctgctcgtcgacgatctctcccgctacatgtgggtgatgatccttggcagcaagggagaggctgcaaacgccatcaggcgtgtgcaggtcgctgcggaggcggagtgcggccgcaagctgcgcgtgctgcacaccgacaacggcggcgaattcacggcggctgagttcgcgtcgtactgcgcggatgagggcgttcagcgccactactccacgccatacagcccgcagcagaacggcgtcgtcgagcggcgcaaccagacggttgtggggatggctcgggctctcctcaagcagagaggaatgccagctgtcttctggggagaggcggtggtgacagcgggttacatcctcaaccgctcgcccaccaaggctctcaacgggatgacaccgtacgaggcttggcatgggcgcaagccggcggtctctcacctacgggtcttcggctgcctcgcgttcaccaaggagcttggccacatcagcaagctcgacgataggagcaccccgggggggttcattggctacgcggagggctcgaaggcctaccgcatccttgacccaagaacacagcgtgtgcgcacggcgcgcgacgtagtgttcgacgaagggcgaggatgggcgtgggacaaggcggtggacgacggcacgactccgacgtacgacttcaccatcgagtacgtccactttgagggagctgggggagtaggcaactcttctccgagcaggtctaccccagcccccaagtctccaccgactccagcgccacactctccagctcctgctacaacgagctcttcaccaccacgcactccagccacgactccggctacagcgagctcttcgccaccacgtactccagcaccgacggtaccctctccgggagcgtcctctccgacaccagctcgtgtcgagcacgacccagtggagctcgtgacccctctgtcccgcgacgaggagcgcgtcgacgcgtgctacgacggcgagccgttgcggtatcgaagggtggagggccttctcatcgacccgtcggtgccaggccctgcatctcgcattctggcaggagagttgcatcttgcatgcgacgatggtgagcctcggtctttcgcggaggccgagaaacatgcggcttggcgtgctgcgatgcagtcggagatggacgcggttgagacgaaccgcacttgggagctcgctgatctccctcatggtcatcgcgcgatcacccttaagtgggtgttcaaactgaagagggatgaagccagcgccatcgtcaagcataaggctcgcttggtggcacgcggtttcttacagcaggaggggatcgacttcgacgatgccttcgcccctgtagcacggatggaatccgtgcgactcctccttgcgctggcagccctggagggctggcatgttcatcacatggatgtcaagtcggcgtttcttaacggcgacttaaaggaggaggtctacgtacaccagccgccaggttttgcgatccctggcaaggagggcaaggtgttgcgcctgcgcaaggctctctacggcttgcgacaggcaccaagggcgtggaatgccaagctggattccacgctcaagaggaagggcttcatgccaagcccgcacgaggcggccatctatcggcggggcaatggagaaaatgccctgctggtgggtgtctacgtcgacgacttggtgatcaccggcgccaaggatgcagaggtggcagcattcaaggaagagatgaaggccaccttccaaatgagtgacttggggcatctctccttctacctggggattgaggtgcaccagggagactccgggatctcacttcgccagaccgcctatgccaggcgcattgttgagctggctgggctcaccgactgcaacccagctctcactccgatggaggagaggctgaagctgagtcgcgacagcacgacggaggaggtggatgctacacagtaccggcgtcttgtggggagccttcgctacctcgtccacacacgacctgacttggcatactccgtcggctacgttagtcggttcttgcagcgaccgacgacggagcatgagcaggctgtgaagaggatcatccgctatgttgcggggactctcgaccacggtctctactacccgaggtgccctggggaggcacaccttgtcgggtacagcgacagcgaccacgccggcgacatcgacactagcaagagcacaagcgggatcctcttcttcctcggcaattgcctcattagctggcagtcggtcaagcagcaggtggtggccatgtccagctgcgaggccgagtacatagcggcgtccactgcttcgactcaggcgctctggctggctcgactgctcgnnnnnnnnnnnnnnnnnnnnnnnnnnnnnnnnnnnnnnnnnnnnnnnnnnnnnnnnnnnnnnnnnnnnnnnnnnnnnnnnnnnnnnnnnnnnnnnnnnnnnnnnnnnnnnnnnnnnnnnnnnnnnnnnnnnnnnnnnnnnnnnnnnnnnnnnnnnnnnnnnnnnnnnnnnnnnnnnnnnnnnnnnnnnnnnnnnnnnnnnnnnnnnnnnnnnnnnnnnnnnnnnnnnnnnnnnnnnnnnnnnnnnnnnnnnnnnnnnnnnnnnnnnnnnnnnnnnnnnnnnnnnnnnnnnnnnnnnnnnnnnnnnnnnnnnnnnnnnnnnnnnnnnnnnnnnnnnnnnnnnnnnnnnnnnnnnnnnnnnnnnnnnnnnnnnnnnnnnnnnnnnnnnnnnnnnnnnnnnnnnnnnnnnnnnnnnnnnnnnnnnnnnnnnnnnnnnnnnnnnnnnnnnnnnnnnnnnnnnnnnnnnnnnnnnnnnnnnnnnnnnnnnnnnnnnnnnnncgagagctgtctcactgagttgtgagtttgaagcagtctttccgcatttgcgcggggggggggtgatggaataagtcttgagcatctagaggacagcctgcttttgactgtcctctgtagtcctttagcatctagaggacaacagtcgctttttgactgtcctctgtagtctctttagcatctagaggacaacaatcgcttttgactgtcctctgtagtcgctttagcatctagaggacagcagtcgctttttgactgtcctctgtagtctctttagcatctagaggacaatcctgttgtgtagtgtgtgtgagaaggtgtggtagtgcagcccctagggctataaatatgtgtccccaacccctctaagggtatagcattgtgtagtgtttgaggaaataaacagaaaattgacccaactcatagtgtcatcctcttgatgagagttagagtccctctacttacagggggagacttgtctcggtttatccctcccttagaccccactcatgtgggagcctccgacattggatgtactctatttgttttaaatatatgcagataaatattattttctaacaatggtgctaattcatgtataaaagtaaggagtaaaatgcatcaggtccccgaactctcaaaactaggattacgtgtcttcgaacttgacgtcttggccggtcatccaaaaccagatttgctcaaactggatgccgatgtggcgtgccatgttggagtcactttggtccccgaacttggcatgctgtatcacttgggtctcagaacttggcattttgtgccacttggcttcccgaactttctttagtacgcttcagcgtggcatgctacgttggcatcgggtttgaacaaactcggttttggatggccgactaagttcgaggacccgttttgctggttttgaaaattcgatgacccaagtgacaaatcatgctaagttcgaggaccactgatgtattttactcaaagttaagttttgggatgtgtttattgggctagggcatgctagtggggtttctctcgttgcaaaacaggggcttgtttgcaaatagttctaaaggcaccttgtgtgtgaaatgtgggttctgtgtgccaatgtcaacaagttttatggatcttgattatagatcgaattgctagaaatatagtagttcaaacagatattggaactggagctacaatttagtcattaatatactattacttcaagtatgtatgggtatcaactatcaaacataggttgtgtttgcttcagcatctgaaaagtgcttctgctctactttattgtattacaatttaactagcaccttggactatacttttggcttccaaccttttacttctccaaatggttggaaacagaaagaaattttacatgtgtatccagggcatgcttatcaagacgtccattaagcgtcacattagagtcgctttagcgctaaggcgcactcacagggcaaggcgtctagcttgccttgtgctggggagtaagacgtccgccgcggcgtaaggcgctggtggggcgtcggcagggcgttctcggagcgtcggcggggcgacgcttaggggataggtagggttttgaagggcgacggctggaaacagagaagagggtttgacctgtgtctgtgtggcagctgcagctgctgcctccttcctcgtcggcgcgcagtgctccggccatcggaggtgggagactgcggtggaagaaccgagggagagagagagaggagagctgtgggggagggagagagaggggactgaagagagatgcagcgtgagggaaaaatagaggctggcggctgctactaggttgctggcggctgtgacctaaaactgtgttttgggctgagctgggccgagttgggctggactcacttgttgtgaggttctttcctgccttttttttctgcttctactagactgaaattggacatattagaccttataaaagtgctagcttgcttattaactttaaattagtgatatataaataatgtttgatctaatttttttgatatttatctatataactaaggcctcgcctcgccttacgctttatcgcctaaaagataaaagagggttggtcgccttatgtcgccttaccgccttaataactatgatcaagggagagaaagaaaggggtaggcttcatagttgtttcaaccaaacaatttatctttttcatagtgcatagctcacatcatcttttccaaagctcacaactcacaacaacttttctatagcttagttgacccaaacaagcccataattgctttttgtttggacctaccagctaattactcatgtgagagcctctgacactaggtttgtcctactaactaactacacaacacatcataggtacgtaacctttagctctctagaaaacttgggcaagtaattcagccaccctgaaatggtgctctataaatgtctcggcttgccaaattttgtttgggccagccaaaatttgacctccaccttgggctcaactctctgaccatattgggcgcttggatcatatggaatggaaccactgtaactgttgttttattgatttttttctcgaaaagcgcaggagaactgcaccccattatattaagaccgttgtttttattgatgctaagtgtttctgaagccatgatcgtggcaggagaagagcgtcaactttggtctatgacaggggctagaggaatctcctgcttgattgtccccaaggttttgagtgcttttttagatgggacattctatgtctcctttttaatcagtgtgtttgtaactattaaatgtggtgtttgttgtgtgggttgtggttcctaaccgaatttcttcttaatataataaagtgccatctctactgcattttcgagaactttttttgacctccaagtggttgccagattgttggggcacgaccaaattttgattttgcatcctatgagtctcatactaaacgtgtcgtgaatatccttgttttatccatgatcattcatttattcatttgcttgtgccttctgtgtagacatgttttttttgcaggtatatgtgtggttgcacactcataagttgcagttgctactaccttgttagttagtctatggttttgctgctttgattgaaccaaaataaaatgttagttgcaaacttttgtcaactcagctgtgtctgtcatttgtttagtattgtcctccattatcattaaggatcagagactttgtaaatggattagtttttcatgaatgttatgatgaaaaatgatattgttctgttctttaaatatattctttgctcgcaacttatattaattgtccttgggctatgttctcatgtctattgcaggttgaatgtttacttgtagaaggtgtcttgggcaaaaggaatcttgtgtattgtgcatccacgaggtgtttgcagatctttcatgtcgttcatacatggacatacctacacacttcacattctcagatgcgtactgtttttttttcaaattccttttctatctaatcttatgtgtatattttttgttgttaaatttgcagtgctggtaaaagttttgttgctgaagttctgatgttgaggcagatactgtcaactgggaatatggcaattcttgtccttccctatgtgtcaatatgcgctgaaaaggtttttgatgatttatacagctttggattggtctgaaacatacttgtgtttgattatttatttatcttttacaggctgaacatcttgaacaacttcttgagccactgggtaggcatgtccgtagcttctacggaaaccaggggggaggctcacttcctaaagatacagcagttgctgtatgtaccatagagaaggcaaactctttggtaaacaagttgttggaggatggccgcctctctgaacttggtgtaattgtcatagatgaacttcatatggtaagcttgtctaaaaccgaagtgctgctcagaacatcctctctttgctttaaaccttttgttgttggtactttcatggttatttataccacatctattttgttatgcaagttcattgccttaggaactgtcatttcagcaatctaggtttgtgacagcattgagagtactaacgtaattttgtaacatttccattgtttgtaatcttttaatagcatgcacgagataattgccatttaatgaggatatttgttggcctgttgttagctattagtgctccttggccagtgtgcattgtggaattggatttgttttatgaaacagatggagcactagagatctggtactatctggaatctaaaaagtagagcgtgtgcattttgtatgactttcttctttaattaatacaatgatacagaactctcctgcatattgaagaaaaaacgatgtacaattgcattgcaagtagtagaggttttatcattgctaactaagagcactacaaattcttgtataggtggtgtatgtggtattggtgtactgcatatatcaatcagaacttcaaatatgatttttcctctcccccttctctccgcctgggccgttagggagtgaattcagtccaacgcctaggggctagggccaccaatctagtccaagtgatgtacctttccctactgcatcattgtttagttttttaggtgttcttttttgttcaaggtttgggatggttagtcatcaacttatcacccatcctatctaatcaagtaatcttgtgtgttactttacctgttacccgagtttccatattgttaggttataatcattaagagtaatttgtaaataagaaaggtttgtcattatggacaattgccagtaaacaagaaacaacaaggagaagtaccattggtcctggcgctgaatgaattctggcagcatacttatcaaatgcaaatcatataggaagatttgactttccttagggctcccctcatatatttgtaatattaggcccaggaccaatagtctcccagctcgccattcggctaaagcactatggcagtattactatttagcaacccctaccaaaggaagcatatagcttgcatctttacctgtctttgtttacctttccatgcccttgagggttctttcaatctttcttcctgtatcctttgacttagtttgtcgaacatgatgtgatatatagttgaaacttgttaagttctccaattatgcaattaaattaacaggttggtgaccaacatagaggatatcttttagagctgatgttgacaaagcttcgatatgctgctggtgaagggactttacagtcatgtagcggagaagtttcaagttctagcagtgggaagattgcaagtcatgggttgcagataattggtatgagtgctactatgcccaacatcgctgcggtggctgattggcttcaagtaagatatttaattctcctagttttatgtacttaatgaagggatgttttactagtgtgagaaacaacattactaacccacagaagttcaacttagcattgtcgttcatttatcatattagaaagttcaaaggcatttgataaatatgtgagcaattgaacttcctaattccacttgtattttctttcatcaactttttaaggttttttttgctgtctttcttcaaacctatagcctaacatgatatcttcatcaatattatctgatcgtatgatcgaggctactcgtatgaccaccgatcatatgactaatcactattagtcatcgattagttggtctagccagctagtcgaacatttagttgtccatgtgcctagatgacctaatcgaccatgccgagttagtatccatcgctagtctccttcgcgtcgccccacatgggcaacacgggcggaaccaaccctagcaacgcaccttcttcctcacctgattctcctcaccgtcactagagcgcgacttcacaaggaaggcaatggcatgtcattctcctctgcctcgtgatcatcgactctatcaagctcctctaccatggtttgagaaggtgctcctcccagtggccaatctctagattctagatccaccgatctctaggccagacctgcgctggttgggcctatggtggccacacagtggcagtgcagttgtcccctctcctctcacaactcttcgttcgtctttggtgggtgatgcctagatccatcgtcactgtagccggatcaggcatctcccgtgacaacggatctgcggagggcgacaacccttgtggtcccaacttcattttcaagcatgttcgggtgcttctcggctctagcactcggtcaactttggcttggcattggcatgtggcgcaaatgcaatagcaactgcattgctagcttgcatggccaccaaggatgggtgctcttagtgaggcaaacaagtgccaaacctgcaaccatgacataggagatggtgggcttgctcaggcttgcgttggtgtttgtcggtacctcaagactagggtacccactcctactggatcaaggcgggacccctgtggctatccctagtcgcatagccacaggtggtccgccctggctcagaatataggttcgtccgacgaggccgctggcctcaggtgggggccaacttccatgttgggctcttcagatccctagcagcggggctccgaagccgccacatgctccaagtatggggactccctacagctttgcctaggggcctgaccccctctgggtggtcccggacacctgcgtatgctacttgaacctccgacttaaagaggtccggtattgccacgtgtttaggcccgtgccagagggtcccggactcctctgagtaccttccgaacccccaactagtggtgctccggatctgccacgtctacagacactcctggctgattgctccctgctcgggtaaagatccggtgctgccacgtgtcttatggcgtgtgacataagccgtcgggaagagcctggcgtaagcctctggcaaggggaagggccacctgtgttcaaggcgggcagagtgcgcggctgttcacacaagtaatagatggcgcgtaccccgcattaaatgtaggtggcgtgcgcaacctgcaaggcctgcccgcgtcagaatcgcgttaccaaggcaagcccattgcgtagcttggacgcccttcattatgacttctattcctcgcgtgttattgaggcatgagggaacaggcggaggggacgggatgacaccgtccttattctccctacgctcacctacgccgcaacctacgttgtagcctttgcccacatgtcgtagcccctcctcatcttaggattagggcgggtgttatccgtcacctgtctggagtttacctctgaccgtgttgatgtttgtgtggttcgtctctaggtggtctttatagggcacgacaaccatggttggctacaacgagccttgtttgtgggcgtagcttttcacctgcaatggctctgaactagctcgagagttgcatgcggtggtggacgacaatcaacttcaccaggactacatgagtaactatgttgactacacatgttggtgtgaggagagatcttggtgcaagatttggttagtattatcttgagtcgatgatgataacacctttggggggggtgccattcccttttttggaagcgtcgatgaggtgccgtctctccttaccccacgatttgttttgaagaagctctgcctagggtccctaggctggtgatggcggcgcccagcgtcgtatcctgcctgagggcatcaccttgatcccgtactaccatggttgttggtccgcatgggacatttgctgcttgtttgtaagcctcaggttttgatgagttcgctacttgcttaaagcatgtcttttgctctcctagggtagatcaataggtgaagtcagagctgcttttgtggggtgcaacaaagcttggcaatgatgacacattatgttcacttccttcaaaagccgggtcttgttgtgagtaggtggtggtgtgttagggctttggctgatgttcgttgtgggaaatcagatctacgtatcacttttgtgggataagctcgacatcgatgacgtgtggtgtgctctgttggttgtttttgtgtatgtgggttgcttaggattagtcgtatgggttgttgtgtttaggtattggccggttttcctttgataaactgtgtgatgtggtgttttatccctgggtttccttataacctaggtcaattctatttcttaattgaaacttcctagttcctactgcgttaaaaaatgacctgatcaaccatgtatataaataaatttgatataaattggtgaatgggagaggcaagcaaccaagcacattaataacatttccaccttcctctccggcgcggacgtcgcccacctctacgcgtctagcatcgccgccgccgctactacggctccccaggcgttcaccgtgaccaccgccgctgctgcagccactgcggctggactcctacccccaacctctatagcagcctcgacctccctggctacctgacctccacggccgccttcagtgccgcctcgacattcgggactctctccccgaccgacttctcccggcagtcgcccctcggtttcaccgcccgcctgtcgtcgacgtcacttgggctccaccacgtgccgtcgcgccgtccaacgactccgccttggtcgctgccatcgccaccatccaggccgccgtggccgcctcacaggagcgccaacgcgtcgcattactccctctggagcaggaatgggccatgggttaggccctgaccactcagctggccacggctcagcgtatgcttctcggtcgtggcaccccgccaccaccggcagtgcttgcggctcccctggtggtcccggagcctcctcatggctctgggcttgacgtcgacactatcgccgccctccacgcctaggccgctggggttcacaacatacagtccctcatgttggacccgacgtcctcccactaacctcactggcgcgctcaggtggtcctcacccttcggcgtttgccctcactgaccacgtcctcgacgatctcgttgcctcgctgtccccctcctgggtctagatggacaacgtggtcctatcgtggctcaacgacacaatcaccgttgagctgcaggacatcgtctgtgatcaggcagacactgcgcgccagacatggcttgctctcgagggccagttccccaggaaccaggaggctcgggtgctccacctcgacgtccagttccatctgttttctcaggggacctctctgtgggagagtactgccgccagatgaagggcatggcgaactctctccgcgacctcggtgagcctgtcgccgacaacaccaaggtgctgaaccttctacgtggcctcagcccccgctacggccaccggaaggctctcatcaagaggaccgtgcctcaactcccgctatggtcctctcatcaagaggaccatgccgtgcggaacgagcttctttttgagtagctcaccatggagaccgaggctcctccggcatcgacactctacaacgctcctcccggcggtcagacaccctcggggggccaggcctctcgctctccatcgaccgaggcccctgctcgccatccacccgctgtcattgcgactcctcgtccggctttcaccgccgacggaggtcgtcgctccctcaagggcggccgtggggtggcagctccacccgtggtggtccctccggccggggtggcggccaggcgtgaccgtcattctacaacccctggaccaggaccatcgccatgtggccgggctaggcctcgagtgcctcccgctttccggcgtcggccctccagacagcgcctccctacgacgtgccttcgatgcctccctacggcgtgccaccaacgcctccggccgcgccctagcacccgccccgaggaccaccacctcgacgccttggtccccgctggctggcggatggggccctgcatccctcgtcaccgccttcagcaccatggcgatgaccccaccccctccgactgggtggttgattccgagcttcttaccacacaactcccactgcagacacgctctctttgtcccatcccatccattcctcccacccctcctggatcctcgttggcaacgataccactttgccggtcacctcaataggtgcctcggttttccctgggccgttctatctcaacgacgttctcgtagcccctcacataactcacaatcttctttctgttcgtcggttcaccaccgacaacttttgttccattgagtttgacccctctggttttctgtgaaggatctagccacatgacccctctcacccgctgtgacagcgccaagcccctctacacgcttcggccttccaccaccgacgcgtctccacctcccgtcctggtctccaccaccacctctaccacgtgacatcattgtctcggccacccaggacctgatgtcatgaccaaacttaacaacaatttagatccttcatgtagtaggggacattttgatggtctctgtcatgcttgtcagttagaccgacatactcgtctcccattcaccactttttggtttgaggagtcttttgacctggttcattgtgatctctgtacctcccctatactcaatctctttggttataaatactatttggtcattttggatgatttttcccattttctttggacctttcctcttcggttgaagtccgacacgttcaccaccctcacacacttcttcacctaggtctccactcagttccgtcgcccggtccgtgccctacagtgtgacagtggccgcgagttcgacaaccatgcctcccgttctttctttctcaccaacggcgtccagttgcgtctctcgtgcccctacacctctttccagaacggccgggccgaccgcataactctttctcaccatttgctgccttctcttccaggcgtctgtccctgccagctactggggtgaggccctacacaccgccacacaccttctcaactctcttccctcgaaggcggtgagccaccctactcccacttcgccctgtacgacacaaccccttcctacgaccaccttcgcgtgtttggctgtgcctgttatgctaacacttccgccatcgctcctcataagctatctccttgctccactcgctgtctcttccttggctagtcccctgaccacaaagggtattgctgtcttgacctcagctcgcaccgtatcatcatctctcgtcatgtcgtcttcgacgaagatgtgtttccttttgctggctcctcccacccaccgatctcgactccctacttgagtctgatccggttacccctctataagtagatggactctaactctcatcaagaggatgacactataagttcgggcaattttctgtttatttcctcaaacactacacaatgccatacccatctaagggttggagacatatttatagccctagaggttgcactaccacaccttctcacacacactacacaacatgattgtcctctagatgctaaagagactacaaaggacagtcaaaaagcgattgttgtcctctagatgctaaagagactacagaggacagtcaaaaagcgactgttgtcctctagatgctaaagagactacagaggacagtcaaaaagcgactgctgtcctctagatgctaaagagactacagagtacagtcaaaaaacgactgttgtcctctgatgctaaagagactacagaggacagtcaaaaaaacgactgttgtcctctagatgctcaagacttattccatcagcctccaccctaggcgtcccgccttgcgccgttgcctgtaccatgtgcggcctcgacgcctccactcgcgcctctaccggcgcggcgacgacaccgtctacctcctgctctacgtcgatgatattgtgccgacatgcaccgtcgacctcctacagcgcacgatcgtcggccctcagcggtagtttgcgacgaaggacctggggcccctccaccacttcctcggcatcaccgccgaacgctggtcccagggtctcttccttcaccagcgccagtacgccatcgacatcctggagcgggctggcatattcgactgcaagccctgctccacgcctgtcgacacttaggcgaagctctctgaggacggcggcccccggtcgccgacgcgacgtcttaccggagcctgaccggtgcgctccattacctgaccttctctaggcccgacatcgcctacaccatccagcaggtgtgcctgcatatgcacaccccgcgggagccccatctcaccgctcaagcggatcctgtgctacctccgcggctacctcgactacgacctccttctccgaccatccccgacgtcggagctcgtggtctacaccgacgctgactgggccgattgtcccgacacgcgccggtccacttccagttctgccgtgttcctgggcgccaacctcgtctcctgggctgccatgcggcagctcgtcgtctcccgctccagcgccgaggtcgagtattgcgctgtggccaatggtgtggcagaggcctcctagatgcgccagctactacacgagctccacatctctcttcagcgcacaaccctcgtctcttgcggcaatgtcagtgcggtctacctctccaccaaccccgtgcatcatcagagcacgaagcatgtggagatcgacctgcagttcgtccgcgagcgtgtcactgcctgtgacgttcgggttctcagcgtccccaccacgctgcaatacgacgacatcttcaccaaggggttaccgtcgagtgtatttttagactctcgatctagtctcaacatctgatctgtacaagatagagttgcgggggggggggggggnnnnnnnnnngcagattttaaaataaaggtgcacagatttgcttcagctctcttcgcagcctctgtgtgttcggtggttggtaatggggcaaacactctcttctggacagataaatggcttcagggccaatctttgctccagattgcccccgcgctaataaatcgggtgcccgcgaatataagacggcgcagatctgtccaagcagccttaacagccaatggttgggtgcatgatatctctggaagccttacggcgcaggtgctgtttgaatttttattggtttgggatttactccaagaggtgcaactgtaccctaatgtggaggatcaacatcggtggttgccatcctcctcggggctgtattccgccagctctgcttatttgcgcttccatggtggtgcaacaacctttgagcctgctacaagaatctggaagacttgggcccccccgcgctgcaagtatttcatttggcttgcatctctcaaccgatgttggacggctgatcgactggcacgtcatggaatggatcatccagatagttgtcccttgtgtgatcagcaggatgagtcagtgcatcacttgctggtggattgtgtttttacgagggaagtttggtttacaacactaagcaggctaggtttgcaacatcttgctcccacgtctgatgctacannnnnnnnnngggggggggggggtgttagaattccatttacggtttggggttctcctcgtgtaattactctctcacccctgtgtaatgggccatgtcctgttaactcatgtctattaatacatcacccaaccccaagatagagttagggtttcccacactgtgtaatggactaggcctaacaacctgggtctattaatacaactcccaaccctgagttagggttaggttttcccacatgtaatagaggtaggttagtttctctcccccaccccatcccaaccgcccgcttctttcccagcctccggtcgccgtcagctgcatgctctagccgttgtccgccgtgtgctcctccctgtcgtcacatcctgcagccgccgaccccgccatggatcctccccaatccgtccctcccctctccttcgcgctggatgctagcgcggacgccgggcttggtgcgacggcagccgacctcgacatgcgcgccaccgcggccctcgacgcatgcacctcgcccgcgcaccgccgcgaacgccgccgccgtgtacgccgccctaggcgtgaccccctcatcggctgatctgcacggcgccataggcgtgtgccctcccttcgctagctcgctctttccccatggctcgtcgacccgctgcgctcgctgttggcccccctacatcgacggcctcgggcccctccgcggcgcctctcctacgaccttcgctgcacaacagcgccaaggttctctgcctggcttcctcgccctcgctgctcctacatggaccgaggacgtcgcttcctcgtcaggctcctccccaacttcctcgacattggttatggatatcgccaccatccaggcggctgttgcggcctcctaggaccgtgagcgcgccacgactcttgccttggagcgcgagcgcgccatggtgccgacttgaccacccagatggccgtcgcgcaacgcctcctcctcggtcgcagtaccaccccttcaccggtggcccctgggactccccatgcccaagggcttgatgctgacaccatcattaccctccatgcttaggtcgccggggtccacaacattcggtccctcgtgtgtgttatgctggacctggcgtcctcccactaccctcggtgtcgcgcttaggtcatcctcacgcttcggtgatactcccttgttgaccatgtcctcgacgaccccgtcgttccgctgtcaccttcgtgggtacagatggacaacgtgatcctctcgtggctcaacgacaccatcaccatcgagctacaagacatcgtccgtgactaggcgaacaacgcgtaccaggcgtggctcgctctcgagggccagttcctcgggaatcgggaggctcgggcgctccatctcgacgtccagttccacctgttctctcagggggatctctctgtgggagagtactgccgccagatgaagggcatgacaaactctctccgcgacctcggcgagcccatcgccggccatatcttggtgctgaaccttctacatggcctcagcccccgctacggccacctgaaggctttcatcaagaggatcgtgccttttcccacctttcatgctgtgccgaacgagcttctcctcgagggccccgccgatcacatctacgccgcatgaagcacgtgcagcatcagcacacggagcacatggagatcgatctgcactttgtccgtgagcgggtcaccgccggtgacgttcgggttctcagcgtccccaccaagctgcagttcgccgacatcttcaccaaggggctgccgtcgagtgtcttcgccgacttccgatccagtctcaacatctgtacaagatagagactgcggggggggggggnnnnnnnnnnnnnnnnnnnnnnnnnnnnnnnnnnnnnnnnnnnnnnnnnnnnnnnnnnnnnnnnnnnnnnnnnnnnnnnnnnnnnnnnnnnnnnnnnnnnnnnnnnnnnnnnnnnnngggggggggtgttagagtactgttagggtttcggggcttgtccctgtgtaattacttgcataccctcagtgtaatgagcttggcccatatagcactcccaactcagttagggttagggtttcattctccaacagttttgttcattatgagcacattttttgtcgacttgatttgttaatagtaagttattctgtgaaggtgctaacttttgatctgtttgggtaatatgaatgatttatagttgcatacctattataattgacgctatgtaatcttaggctgctctttatcaaactgactttcgaccagttccactggaggaattcataaaagttggtaatcaaatatttgataaagacatgaacgttgttcgtgtccttcccaaagtagctgaccatggtggcaaggatccagatcatattgttgaattgtgtaatgaggtaaatctgttatttacattgcaggtcttagtttttctctgttaaacactacaattttgaagcaaattgaatattgtacttgtatttgttccaggttgttcttcagggccattctgtgcttttgttttgctccagtcgtaaaggctgcgaatcaactgcaaggcatgttgccaagttcttgaaactaccctctgttggaacaactgatgttagttcggagttttcagatgctgcagctgctattgaggccttgaggaggtgccctgctggattggatccaatattgggagaaacccttccttttggtgttgcatatcatcatgctggtcttacggtatggaagctatcttctatcttcataagatacacaaaatatcaaatatatatatatatatatttatttatttgaaatttgcactgctaaatatgtgctaagtggtgagagtggtctcactaagccaccaggtcgcgggttcaaagcaaccccttcacatttgcgggggaagggttgccttggttttatcccttccctagaacttactcacatggcctccgtcactgggtctgccctttacactgctaaatttaataaagtgatgccatttttacctaaccacagctgggcaaagggtggtaggaactgatctgccattacctgttctgattgatccaatgagcgtcatcgccttctgttctgtggcaggtcgaggagagggagattgtggaatcatgctaccgtaaaggccttgtccgtgttctgactgccacttcaactttagctgctggtgttaacttgcctgctagacgggttatattcaggcagcccaagataggtcgtgattttattgatgggactcgctatagacagatggctggtcgtgctggtcgaactggaatagacacaaaaggagaaagtgtaagctacaatatctttgttccactttattctattagagaatggttctgacatttcactagttctgttttaattgtgtttttaactttagcctaccccaactgcttgggagaaaagggctttgttgttgttgtctaataatctgacatttgaaatgcatgcagatacttgtatgcaggcctgaagaggtcaagagagttacaggtattattagaagcaattgccctcccttggagtcctgcctctcagaagataaaaatggaatgactcatgcaattatggaggttgttgctggtgggattgttcaaactgcaaatgatattcatcgttatgtgcggtgtacgctgcttaattccacaagaccttttgatgatgtcgtgaagtcagctcaagactcccttcgttggttatgccataaaagctttcttgagtggaaccatgagaccaagatatactccgctactccccttggtagagctgcttttggaagttcactcaaccctgaggaatcattggtagcatacttgtcttttgctccttcattattttattgcattgagaaagggcctctagctgagttggttaggtggtctgagtagcactccttaggttctaggtttgactttccgtgggagcgaatatcagcctgtggttacctcccatttgtctgtcccacaccaaagcacaggtctaaggtcctgtctagatcgtagtcgtttctcaaatgggctacggtgccgctgtgtatgggtggggcaggggttcgggggttttctcgacctgcgtgagaaggtcttcttaatataatacccgagggctgtcttatcccccgcaggtcgagttttttttttattttattgcattgtttaatcttgcatttttctgtttctgcactaggttgttcttgatgatctttcgagggcaagagaaggctttgttctggcatctgatttacatttagtttacttggtcacacccataaatgtagaccttgaacctgattgggaattatattacgagaaattcatgcaactttcttctcttgagcaggtatgcaagtcttcttttgtcctattgcacttgaaagttcatttatcaaactgtaaatagaatatccagaaattcgagttctatctgtactcattagaaaatagttgaaagtgaattccgaaaacatgattttagttgctgttgaactaaatgtgtgaagcaaaagtgaattcagaaaatgcaaatcaaatttgttacggttataatagtcataatattagtgtaatcttctagtctagggtttccctcatgtttctcatgtactcttatagtgcttattcatccaattcagtgcttgttaatggaatgtgtgaagtctatttcggtatttttacataaccatgaatcagactaaaacatgcatatgtttattgaactccttcgcactgtacttggttgcagtttactacatatgttatttgacctggttcataagatttttttaggagttgtcagttcttattagttttttgtaattcccatgttttctttggcccaacaagaaacagaacaactgacatgataccatgttttctgcagaacattaatcttttatcagtggtattatcattagtgccaaaatgtttataactgtatgccatgtctaccctactaaggcctaagactgtgtccaacactgttttgcactgttcacagagtggagccaaatgtgttcgcttgactttaatccgtaccggcttctattgtttctacagtatttttgtctgtatagattgcagctacagcagtccaaacagttggctttaatctgcagtagctacagacccttttggacttgcgcactgctcatgcgaaaagtggatgcgttactgttcatgtcgggtcctgggtttgttaagacagatattagattagatcgggttgacttgttggctatttctttaactctagaaaatagttaaggatcaaatctacacatctctattgggattgtatctactttgaattaagtaagaaatagatagttcaacagttcctatctggctatctacctccttaacactggctttctcgcatggccaacatgaagtatgcctgtgacaccgtatctttctgccatattggttgagaaatcaaaccattacttaaattatcaacttcagttcagttcatagaacacataatttcactcatttttttaatttctgtttgttttgttggtacaatgcagtcagtaggcaatcgggttggagtaattgaacccttcttgatgcacatggctcatggggcgtcgataccttttcgtgcaaggcctcagagaaacaccgggttaagtaacaagtctgcacaagctgctggaaatactcttgttagtgagcacacaatcagagtgtctaagcgcttttatgtggctttaatgttatcgaggcttgctcaggtataatctaagaactacttagacattgcatgttagttctatgtcaatgcatagtgctcaagatcgctagaaagcctaagtcgtgaaatgtaaaaaatagttcaatagagattagataatgaaggttgaaatgttctctcattatatatggctaattaaaatattagctcatgtcttatatttttgtagaatacacaagagagctatgtatcatttcattgagaagggtataaataaataagttacaacacacccaccacactcacacatatacacatacaaacttgtactggaaacaattcacaacacacccaacatgccttttgcatcagaacaagacccttgggtgggcatttggggaactaaaaatttgtgggtactagaaattgctacccaatttcgagtttcgacctcgaaaaagcattagccaaaattttagatacttgataatttgagttccagttttacttggtgtacctgataattccagtagcattttaaagtaagaaacaaaagtccatcaaatcatttcatatcaattaacaagaaatcaattatcaagatagtacaaatctacattgagccataccaaataatagatttacactatactgaaccactccatatcttcatattagaaaatagaagaacaaaatttttgagatattttgcgtaattcgggtataaatttacccaaactacctgaatggaattcagttttctatagctactattacgaagatggtttccatggtgacctgctagatgggctatatgggcgactcagtttgtgggaatcttatccaaggtatcaaaggtgggacgacaaccactcgaccagccgtgtttccacctgtgaattccttcacgatatgcctgccatctatggctatggcctcgcgccacctcccttttatcaaaccacgcgagcaacgtccctcccatcgggttttcaatgtttatactcgtttgtcaaaaaggaaaatgctctcttgctcagtttcttggcaacatggactttcaagaaaattttcagacacctttttggctctttctatggaagccaccgaagaatacctcaagttctatgatacaattatttcagttcaaaacaacatgcaaggcaaggataaatggatctattcttggggaaacaacaatctacgttcaagcaagatttacatattaaacttacaatccatgtacccaccttctcctttcaagtggatctagaaatccaaagtgagtaaaaagatcaaggtgctcatttggctgaccttcagagacagaatcaactcaagaaattttcttcgaagaaagatgtgtacaattacaaatgatgattacaaccatgttctttgtggccttaattgtgaggaaaccacatatcatcttttatttgaatgtccattcagtacattgtgctggaatcatgttggtattcactgggatcaccctttggatttttttgaaatgaccatatctgcgagggatcaattcagtaaaaatttcttcatggaaattctggctgttacgacctgggagattttggaagcaaagaaatgctgctatcttcatagattcctttccatcttttacgtcttggaggttttgcttcaatgacacgttggggctacaaatgcatagaatgaactcgaatcttagcttgtcgatttccttgtggcttgcttctttattttctttacttctatctccatttgcttctattcttccttccctttactgtacatttccttttttatttaatatataccactgtatgggccttccctacagtttcatcggtcaaaaaatgtccctccaatgccctccctactgccacagtctaccatgccacaggttgttgcagcactaccatgcgctcccaccatatcttgcccaatttcatgtgtatttacaagaatttactggtataagttgctgagaaagtttgggttacacagtttgacccctgagccaggacatacatccttcctagactggtgggaggagtcttctgaagaagttcatgggatggttaagaaaggtctgaactcccttatcatcttgggggcctgaatgatttggaaccattgaaaccgatgtgtctttgatggactgacttctagtctttcctcgatccttgtgtagactgatgatgagagaagggcaactttggttaaagctgtgctcactgctattcccatttatcatctaattgctttgcaatgtccaaggtgggtaatcaaggcaatagacaagattcgcaggggttttctttggaaaggaagaactgacattagaggaggacattgtgtcgttgggtggtccaaggtctgtcgtcccctctctcttggtgggttgggaattcacaatttggaagtnnnnnnnnnnnnnnnnnnnnnnnnnnnnnnnnnnnnnnnnnnnnnnnnnnnnnnnnnnnnnnnnnnnnnnnnnnnnnnnnnnnnnnnnnnnnnnnnnnnnggcccccccgcgctgcaagtatttcatttggcttgcatctctcaaccgatgttggacggctgatcgactggcacgtcatggaatggatcatccagatagttgtcccttgtgtgatcagcaggatgagtcagtgcatcacttgctggtggattgtgtttttacgagggaagtttggtttacaacactaagcaggctaggtttgcaacatcttgctcccacgtctgatgctacaaggtttcaagattggtggagtgaggcagaaagacaagtgtctaagcataagaaaaaaggtttcaactctattgtaattttagtagcttggcagatttggaagcatagaaatgcgtgtgtgtttgacaatgcttccccaaacattcacgcaattttgctgtccatccatgatgaggctttattatggggtcttggaggggctgctgctcttaggcaggtttggttgtagtttgatttttggttttttaattttcgggggtgctttcttggcacctttgtactgggtcttttctagacccttttttcttatcttcttaatatatattgatgcgtggttctcccacgtgttcgagaaaaaaagatgatgagagaagaatatgggaattagctggggccaggggtctttccttcttggcaacacctcttcttgaggtctaacccccctggctctttagtgggtagtgtgagtgtttttacatggatcctttcatttatgcgtgctgttggcctctatagggaggttttttcttgtaacccaggtcttctttagaccttcctttccctaatatatttaaagcttagttcccctgcgcttcctagaaaaaaatatctcgcccaattctcatgcaccaaattcagttcccaacatcgtcttggctgattctaggatggtttgacacattatcgctggccttggtggactacattgccgctgcccatgcagtgtcgtgcttccacaagcttgaatttcattcatacgaatgattgacgtagtgtgagtagttcttccatggctaacacaccttggaggtcgacaagtcgtatcacctattcgaacatgacacgagcacactatcgtggatcgaattcaaggacctttgcaacttgtgtttttggcccccaattcgcaacaaccgcgttgacacattggctcgtcttcgattcttgaccaagatgcaagaataccaagatcatgtcatgccaacaagcgaagttgttcgctatgggatttccaaaatatatcaatcttgacatgaaattgtgggagccccaaaatcttcatataaaatcttcatataatcctatcatgatggcacacactgaacaaccatgaccctagtgtgcgttgtggcacactgaccaaccatgaccctaatgcacaatcagcactgatgctgaactccaacgaggaccactccaatgacaagcacatggacgagcaacaactctagcgttgcacctactctgtctattaacatcaatcgagttgtctaatcatcggaaacaagggttttgtcataattgtgatgagcaatacattcatggccatcactacaagtgactcttctacactgacgttgtcaactatcaggattatattaggtggctatgttgttgtcctcagtgtggccttcctgcgcatacttgcctcgtgttctagcggtaccagtgccacgtcttatgaaggggcattaggtctacatgcgcaagaagtctagctatggttaacgactccgtcaacaccacaaactctaggttcatggaccatctcctcaacatataagttgatctttttgctgaaacaagaggactttatcggcttggcgctgccaccactgcatgcacctgctactaaggacaactctagtagatgtcaatccatacatatacccacaactctagaagaataagctccatgctcgagaacaacatccaactgagtacattagcattgttgggccttgatgcttctcatcaagaaggttggcaactcatggaggttctgctttgactacagtgtgttgaattggaagacagtgaaggataaattttcgatcctgatggtcagtgagctactcgatgagccacccaaaattctttatctagctcgacctttggtcaggctaccaccaagtccacatctaccctgacaatgcgaaatgatgtttcttacacatcatggccacttcaagtttcttgtgataccgatgagcatcgccatcgcactagccacattcaacaacctcatgagcgacatgcttcgatagttgctttgctggctcgtccttgtattttttgatgtcatcctgttatagaacatttcttggatggagcatttgcaacatgtcaaggtggtgtttgatgtgctatgtgcgaacaagttgttcatcaagtggtccaaatgccacttcggtgtgttgttcgtctcctaccttgaccatgtgatctcggtgtatggcgtggctgtggatggcgaaaaggtggaagttgtggcatcgtggccacaactgtgatccactagggaactctgttgattccaagtatcgcgggtattacaagaagtttaacaaggactttggggtcatcgtagcacctctcatgaagctcttgaatgagggtttaggtggtgccaagaagcagaagatgccatgcaggggactcaatgggctgctatcaaccgcacctatactgcagttgttggcatttgacaagctgttcacggtagactgtgatgcgtcgagttgagtgcactaaggcgccagagcattgtcattctttagtgtaggtccttcgtagctcgacatctcaaggtggtagcctacgtgtgtgatacgattggcatggtgtaggcggtacaacgttggaggcatgggcttggtgcaggcggtacaacattggagtccctacttatggggttgaagccgatatggcattggagtccctagttacggggcaccattttctgcgcttaaagttcctgctcgatcaaatacttatcaaccccaacatcaatggatcaacatgctctttgactttgatttggttgaagtgtataagtggattgcctagcttctcccatcagcttaagcttttgggttgaactggttagtgtgtccactctaacatggtatcaaagccagaggtctcgagttcgaatcctgacagagacttaatttgtgcctccacccatttatttccacgtttgcgcgtttctctttgtctgcgtttgcgcctttctctctggctacacgtgagtggggggtggtgaagtgtataagtggattgattaccttctcccattagcctaagcttttgggttgaactggttagtgcgtccactctaacatggtaacagaaccagaggtctcgagtttgaatcctggcagaggctttatttgtgtctctacccatttatttctgcgtttgctccttttccatcagcttaagttttttgcgtccactctaacatatttcatagtgaagttttgggcaagcggaacacacttgctgacaccttgtccaatctcctattgtgacattgagactgtaggcactctcaagaccctcgttctagctctataacgacatttgccacgaggtccagacacagtgagttgggcgatccttggcggatacacgatgtcctcatcctccacgacaactagatcttcctagacacatcctctagcttgttgttcacttctttggagatcgcacaagacaagtgtccataaaaacgctcaagtgcctccaagtggacttttatattgctcgaggccgcaaggtggtctgttattttgtgaaagccttttcacatgctagaggaacaaaatagaaactcttcacctgtcgggactgctctagccattgctggtgatgttgaaggtttggaagggtgactcccttgacttcatggaaggccttccaagggtgcacgagaagtgtgatcctcacagtcaccgaccatttttctaagtatgcacatttcattgccctcgttcaccacctatagattgtggcatcggttgtgaaggcgtcattcgatggtttttatggcttttctagcatccattgtaagcgaccaggaccccgtgaaaggtaacttttggctggacctcttcaagatggctggtgtgagcttcgtataagcatagctttccatctacaaactttttttttcctcgaacagcgcaggagaactgcgcgtcatttcatttaaggaagaaagtaagtacaaaggtcaagagtgacccgaaacacaaacaccaacacacacacgccatccctcaaatacaaccgtcgcgccacatcaatgaagaaggcgaccacaacctacagggctaaaaaagcaccagtaggcaccgacccaaaaacaagttcctggagtttggaagctccagccaaacaccacagccccccttccacattaacagcttttagcacttcctcaacacatggcctagaattgtcaaagacacacctgctgcggtgcttccaaatctcccaagccactaacataattagtgaattgaggcctctacgaagccccttaggaacagcagcaacagttctcttccaccaacctgggaaccgagacactagaggtggtgaatagaactattgcaatgtacttgcagtgcatcacgggagataggtcgtgcacatggctggaatgactgccatgggaagagtattgatacaatacatccttccaaatcacgctcgaagataggcgccactgcccttggtcccattcacagtgcgcaccacgcgaactcaagcagtgcagatggcgctttaggagcgtgaccggtttttggcagagctctatgaatgactggttcaagcccaatatcacgggaaacgctaatacaataagcaccatcgcaaactagagttcgagatcggctcttgggtgtggccatgaacaggttgctgaaaagtgtctctgataccaaagatgatttgtctggattgttggctttattgatacaatgacaaggaaatcatcctgaccgccctccctaggaggctctggtcataataactcacttcttgctaaacccgtaatcaacattaggtttacagataaataggcttagaggttagctgttagagaaaggtatatgctgttgcaaaagatgatgtcttgcattgagctcttagatgatttatacagagtacatggcgtaggaggtaagacaacccatggatacatatggcagtctatgaagtataatatctagactatcaaatatactctaacacatgtggcagtctactagacaatatctagactaccaaatatactctaacactaaccactcccctagaatttctcttttttcctattgttcctcctagacttccaactaagctccatgcagacaactacggaaaaactcaacaaacttgacaactaattaggcgtggctgttagccacatggtgttgtggacgctggcttgttcttcttgtggcgagtatagacttgctgataagcgtccacaacaggttgttcgtgactgctggtgtgttaactctactatgaaaatatctatgtgcagtatgaagaagctaagctatttggttcagaactgaacctgtattcagtcttagcaactctactcatcaccctcctctagttgcaacccaatagagtatttctgatatgtctttcatatcatatgcattttgtacaagcagattagattatgtccaagttgtgtattgtaatgattttaatgtaagtttgtcttgtaatatagtctttaggaattgttccttgtggtattatttattatctgtttcttcttgtcttttgtttgtttatcttttattccaagttggggtgttcccatcttgtttccttgaaaagattgtactgttctcatgtaatgcttctttcaggagattcctattgctgatgtttgtgagacatttaaggtcgccagaggtatgattcaggcactgcaggaaaatgctggcaggtttgcttcaatggtttctgcattttgtcaaaggcttggttggaatgatttagaaggccttgtttcgaaattccaaaatcgtgtctcttttggagttagggcagagattgcagaactgacatcaattccatttgtcaaggtgtgctttaattaccatgcatatatgaattatctaagtgtctctggatcttatttcagtatggtcatgtaaaatatgaaatagggttcacgtgcaagggctttgtacaagtctggtctgcgtactcctgttgccattgctgaagcatctattcctgaaattgcaaaagctctttttgaatcttctgcttggtctgggcaaggtactctttcacgtattcatggtctgattccttactactcttttttatagtacttgttttgatgaggatataaatactatagctgaaatcctgtcctgtacagtcaaggattttccttgtacttatcttgggctacctctcacaattggcaaacccacaaaggaggtcttgctgccataattgaaaaggtggcagaatttttgctgggatggaaggcttctttaatgaactgtgcaggcagattggtaatggttcgagtagtgttaactgctgctcctatttaccttttgattgccatggatctaccaaagtgggttctaaaagccatcgacaaaaggaggggtctcctctggaagggccaggaacaagctaagggaggtcactgtttggtctcttgggaaagggtgcaacagcctctggaatatggtggtcttggaattcataatctggatctgcttggctgcgcgttgcagattcgctggttgtgggctgagaaaactgatcctagtaggctttgggcaggcctccccgctcaagtccctcgcaatgcttaggccctcttcaacattgcagtggacatcattgttgggaacggtgagcaaacactcttctggacagacagatggctggatggccataccatatctgaagtggcacccagcttatttagtgctgtctcgaagcggacagccaagaggaggacggtagcccaagctctccaaaaccaaaggtgggtggatgacatcaaaggagcactcacagtccaggttatattcgagtatctaaagattgtcgcatggtggatggtctgtttttgcagcaagatgtgccggaccaattttgtgtggaaattaacacaatccgacatttacacagcatatagtgcttatttcattggcaccatcaaatttgggccatggagaagaatatggaacagttgggcacctcctcgctgtaagtttttcatttggctggtgttccataaccggtgttggacggttgatcgccttgctaagagaggcttgccccaccctgatgcgtgccagctctgtgatcaagatgatgaagacattcaccatctcttggcctgctgtgtttttgctagacaagtatgagcaagcatctttcttcagtcgggccatactgccttggcgccatatgcttcaacaatctgtttttcaaaatggtggtggacagtaatctcaactgttcctaagaaaatgcggaagggtctaaattctttgatcattttggtcgcttgggaactgtggaatcattgtaatgcttgcttgtttgagcaacataggcccaatgttcaggaagttcttagggctgttagggatgaaggtagtctctagtgcagcgctggagcaaaaaagctccaagagctaatggtcacggtgttcagtctgggggattaggagcttgttgaggttcctttccctggccgcctttcttttttctcttctgtttgggttttagcgtctccagggtgggaggcgtgatgtacagtgggtgtgggtgaggtgttcttgtatttatttttggcattcctgcctttcttctaccttaatgaaatgttgcgcagctctcttgcgttgttcgagaaaagaaaagatgcacaaattggtttctcagttacttctggatatattcagtaataagcttgcagatactttattgtttgttttaagcctactctaatgtcaatctgttgaattgactaggtgattctggtttacgacgaatgcaatttggtgtagcaaaaaaaataaaaaatggagcccgcaaaattgtcctggaggaggcagaagccgccagagtagcagcattctcagctttcaagtcacttggtgtggaagttccccagttcactgcacctccactcgcagctattgaggaatatccaactcacgataccatagaccaagctaagttaaataagctagcttctggtacccattctagagatgataaaaatatgaatacttgctctgattatgctactccaagggcttctacatacagtctaagaaaggacacaagtcctgctccttccattcaaatgaaagagaatgcaggactatctaaaaatgtgcaaatcactagacagggagcatcatcatctttgtcaacagaaattgctgatggatctagtagagatgtggctgaaaaaggtcctgtccatgcatataacttcccagggggatttgattgttttcttgatcaatggtccacagctagtaattttttctttgatgttcattttatcaagagatcgatgaaaccatctttgaacctttttgaagtttttgggttggctgtctgttgggaaaaatctcccatatactactgcaacttcccaaaagatctagtcactactggcaacaataacatcaaggaaatgtggggtaattttcagagaagatgggaaaaaatagcggacattatgaaacaaaagagtgtccaaaaaatgacatggaatttaaagatccagatccaggcacttaaatcaccttatatttcttgccaacggcttgaaaggtttcatcttgaccataaaatgctggacaaagttgaagtgcttaacaactcatatatgttgttatcaccagtctctgtctacaatggattggatatatgtctgctggcgtgggttctatggccagatgaggaaagcagagcggttccaaatcttgagaaggtatttgatatatgtcgtgttctgcaatatctttagcttttcgttgctgatgcattgtcacttcatgtacattttttatattcgtttttttctgaactttgcaaaagcaatatgagtaggaattttagttgataagagcctcaagaaccgtgtgttggatatgaaaatgcaaggaaataggattattcatatagggcatgatgagaatgctaagagactttttaggaagacttagatgtcatgtttacaactatacctatcagtaagaaacttttcataggagatctcaatgggcatgtaagtacaacaagtgtaggttttgaggtgtttcatagaggcttccccaagcttcacgtctcagacaatgtttcttgaccaagtgggtttggctatgacatgaagctaagaaacattgtctggtcatgtccactttggagcgtaccgctcgtttacgctctcgaatctgcttccttaaagatggtgataccaattccatagctatgttttctggtcgcccgaccagctagtcgaactgggggatcgaccagcgactaatctcgattagtcgtcgactaggtccgactaatcgagctctggtcgacctggtcgtcctgttcatccaggagaccaggacctatgtatatactatataatatatactattatactatatagtaaataattatataactatatagtatatatgaacttcatatactatattatgaaggatagggtaaacatgacatgaattcagcaatactgaaaagtgaaaacagcatagaaacacttctagttattaatactacaagtcccagataccagtaccacacaacacacattaatactacaagtccaaaaaaaaatctaggtcctaaacctagtcgcccagaaccggctaatcgagcgactaatcggccctaatcgtcgactagtcggacgaccagggcgaccaggtactctagtcgagtcgactgcctaatcgagctctgctaaccgactagcccgactaatcgcgactaatcgcgattagtcggacgacttgaaaacacagttccataggcatgccagtttccggaaacaaaagaactttattgggaagttggtggttgatgatcagattttcacctcgcaagatgagaaacagaagcttgatggtatcttaattgcggatgcaagaggagacttatctttcagttatatcttttggtcgaacaatgtgcttgacaagtggagtatagtggtactaatctacacgagtaagggaaatatttaaagttgtatcaattaccaagtaattaagttgatgaaccatactatgaagctatgtgagagagttatcgagcattgtttgagaggaataatgaggatctctatgaaccaatttggtttcatgtccgaaaggtcaaccatggaagttattttcttaataagacaagggatgaagcagacagggagcagaaggacctacacatggttttgttgacttggagaagacttatgacaatatactaagaaatgtcatgtgttggtttttggacaaacataaaatctcaaggaagtatgttgtagtcattaaagacatgtgttcgaacaagggatggagacacaaataacttttcgattagaatatgactacatcaagggctggctttgagcccttatctttttgccttggcgatggatgaggtcacaagagacatacaaggggataccccttggtgtatggtttttgcgcacaatgtaatgctagttgatgaaagccgagcaagagtaaatagaaaactagagttgtgatggaagactctagagtctaaaggtttagactcaatagaacttaaactagagtatatgagatatgacttcgacactactgcacatgactacatacggaaagagatcttagtttggaagtttaagtagtgcttaggaaggatatcttttagtatttagaatcaatgctatagaatgacagggtattgatgaaaatgttagccatagaatcaaagtagggtggatgaagtagtgtcaaccatatgatgttctatgtgacaagagtgtaccacagatgctaaaagacaagttttaccaaacgatgattatacctgctatgtagtatggtgtagaatgttggcctataaaaacacattttcaatagacaagaagggattgagttcgaatcatggaatggtgatacacatgataagctaggggtagcaccaattgaagaaaatcttgtctaacacctgttgagatggtttgtaccatggtttttaaagcggtaaggcgctccaaggcgttggaccaccgcctagacgcctaggcggcgcctaggcgacgcctaggcgaggtaggcgggcaaggcgcctaggcgtcagaccaccgcccggacgcctaggcgtcgcctaggcgacgcctaggcgacgccttaaaaacagtggtttgtacatgtccaacagagaactccattagcaccattgtgtagtgacgcgctaataatgggaagagagatggagaaaggctaaagttaatatggaaagaggcattaaaaggagtcaaagatttagtcttgaataagagtgcatggaaaatagctatccatgtgcctgaaacttgacttatggtttatgttgggtttcaacgctagcctatcctaacttgtttgggattaaaaggatttgttgtttcttgaatacgcaggaggtctgcgtatttttatattaagaagaaaaaaggggggggggaccccaaaacagaaacaacagttttacaaactcacaccaccattaacgcctaagacaactcctctaaaaggatttgttgttgtttgcaatagcaatacacagctgttaattttgatgctgacctatttctgataatatattacttttgcattttactttgtgataaacagtttgtcaagaggcgacttcatagtcaagaagccgctgctgcaaatcgcgatggaagatggagaaatcagatgcacaaagcagcacacaatggctgctgtagacgtgctgcacagacacgggctttgtatactgttctgaagaaattacttactcaaaatctttctgttttggttgaaacaatcgaggccccattggtacaacacctattcttacttaatactctctccagttataacaaaagtgtcattttgggttgcctgcagttaatttgtttatactttgatgctttggattgaatatctgaaaataacgcaactagattcttcctggaaagtagttcaaaatataacaactttgttatagtttcatacattttgtagcaatcgaatcatcctattagtacccatgttggtatccaaaattacacttgtgatcggaatacaatattgctgcttgtattatgcttggatatctcttatgcatttattttgacaggttaatgttcttgctgatatggagctttggggaattggcgctgacatggatgcttgtctccgtgcgaggcatattataacaaaaaagctgaaggaactagagaaagaagcttacagattggcaggcaagaatttctctctaaatgctactgctgatatcgcagacattctatatacacacctaaaattgccagttccaaaaggctgtgagaaagggaagctgcatcctagcactgacaagcagtctttggaccacctaaggtattttttcattttccttgttagttctgacatcaaacatgttatttctagttctttggaagtacttgtgtgccactttatgtccgtgcattatggatggaaaattttaaatgtgttagcatatctagtgtctagtcactgatggtctattggtagttttgtgtgagtaaaggtaaattattatgttgtcttgatcagagctagaaaagtgcttgtggaccaccggccacatgttattggcagttaatctctggacatgcttttagaatatcattgtgctaatatgcactctttttctgttttttttggagtcaattaacaggattaactcatttttcatccctaattaaatacacgcatgcatgttcaaataatatcttcaatttggaaaagcttatgccaaagagaagcacatgtatcactgctttactgtattttcagtatataggctgctgctgatgtccttattgtatgcactcggaagatcggtagcaaggcaacactacaacagccttgccaagctggtcttcctttcgtttgaaatctatggcactcttttgatttcacttggccccaaattttcctcgacataaaattgccgtggctttatagtttactataaaatccttatcaactggacataatgctctctttaggcttctattaattatcccagtaatgtaggagaatttaatttgaccattttgctaaaatatttttgaattcttctgtttcctcagggatcaacaccccattatcccattaattaaggaacacagaacattagcaaaactgttaaatggcacgttgtggtccatttgttcacgtgctcaattgtgcactcaatcacaaaggtacatcatacatggaaattggcttcagacgtcaactgccactggccgtttgtccatggaggagccaaatctgcaggtcctttagttgtaataaatgctttgcatgttttgtttggatttcagttattgagaaataacctactgacttaacctgttactatgtagtgtgttgagcatgtggtggaattcgatacagggaaaagcgataaagattactcaagcatgtcagttgatgatcatcataaaatcaatgcccgtgattttttcatacctaccaaggtttttctcatttcacttttatgtatttattaagttttccctttaattaggacagttgactattttcctgtaacaacgctttatttaatatcatgatttacttattttgtaggagaactggttattcataactgctgattactcacagattgagttgcgtttaatggctcacttttctaaagatcatatgttggttgaacttctaaagaaacctgatggtgacgtttttaccatgattgcttcaagatgggctgagaaagaagaggccttgatttcttccaaagagagagaaaacactaaaagattcatatatggcatcctttatggaatgggtgcaaactcccttgcagaacaacttcagtgcagcactgaggaagctgcacagaaaattcaaagctttaggagattttttcctggtgtttcctcatggttacatgaagttgtgttatcctgtcgccaaaaagggttagtctacttggtagcaatttctgtttagtctttctttttatataatattgctcctttgatttttgatgctaacattgaatgagctctgtgaaaaatatgttagtcttaacttttgtggtatttcatatctgaacttttgagatatttcatatttgagcatgtattatcatatctttcaatgttagtatgcgagctgcttctcataataatttaaggtgaatatgcttcatgataatttgattttatttgaatgttaagtttatacagtaaatgataaggattactgtcttttggtcatgttatttatataacgactacttaagatcagagctcctttatctgttgggttgacatatgcacttgtagcccatattgctcatgagattgtatatatattgtcgtatccactactagcggtcttacgaaaccccaaggttactaaagccatggattagagtttgggataactttcaaatgcactcatgattcaattttctttttacctggtttgtgccgatcagaattaatgtctgcgcccttcttcagtttgttgtggcctaacttgtgaaacccttgctatctcacaacttccatctgttagacaatttattttcttccctagttacgaggatttcttctctgattatgtgccagcagttgtttcctccgtacgtagctgtccttgattaggtgtggacaattggttccttcctccctggctgtttccttttagcgcccagatcatctccccgattattgtttccatgaaatcaggtggagcacgttctggtagaggcctattgttctcctgctatttagttgaatataagcaacatttcgcgctattatggcatcaagagattgttacgatcccgtgagaactcgcttttggtaatacttgcttgcccacgtcgcctccccgatgttgtgccgtcatgccacctagtgaccctctgcccgttttccggtgaccaacaacataccgaggatgcagccacataggagaaggcctgctagatccttatcgttgctgccgatgaggctgtcaaggccgtcactgccgcctaggatcatggccgcacaacccaggacgctctcgcgagggaacgctaggctgctaccggtctcaagcgtgctaaggccgctgctcgtgacgctgccttccctcctctcaacgacgaccctgatgatgacgccgacgctagtgaagacttcaattatgaggccgctaccgcctccaacctccacgtggaggccgtgggcgtacagaacctccatgcccttgtgcctgtggttctggacatcctctccacccactacagtcgctgcgggatctcgtcctcctcgccctcgagcggtatgccgtcgccgaccatgtcctcttcgacgccctatttgtgccatcctatcgacgcatggacatcgtcgtcttgtcatgggtgttgtgcacgctctccctgagtttgagttcgctcgcacccccggcggcacaacacaccacacctggatcgttgttgaggagcaattcctcggtaatcgtgaagctcgcgcccttcatcttgacgccaaattctatgtctttatgcatggtgacctctctgtcggtgactactgccacaagataaatgggatggctgacgctctcggtgatctcggagtggttgttcgtggccgcatcctcattctcaacgtgctacacagcttgaacgagaaattaaaccacatgaaggtccactttcatgcactccaagctgctaccttccttcgtctgcaacgacctcatcctcgaggagattgactacaacgcatcaacaccgccaccagcagccgcccttgttgctgtgcatggcctttcggtagctctgcttcccctagcgtcccctcttctgggggcttagctgcgcccctgtcccacccacggcgccctccggtagcatctccactggtgccgacagctattagtagctaccgtcgtcgttgcgacaacggtggcgttgaaggcaaggccatggttccctagcctttgatctacaactcgtggaccgagttagtcaccatgtggcctggccccacatgtgggccacaagaccgtggtggccaaacgccgcgcgcgcccatgcctcaggccacgcaacaacagttgacaacaacatgactagttcgtggtcatgtcgtttggcttgaggaatgcgttaacatcattctagtcccccttgagaattgaatagcactcctagctgacaccatggactcatcgcactcttcatgggttgcttggcctcacgggcttctaccgcttcttcatcaacaactacgacatcatcaccacaccatgaacatccctcaagcgtgttgccttccagtgtgctgatgtggcgactacatcctttgaggccttcaaggcggccctcacctatggactggtgctgcagttgttgagcatcacggcttcgtccatcatcgattgcgattcttcgggcattggttttggcgtgctcttgcccgatcgccttgtttagtctgtggatggagccccagcctaccaaacttgccacctaagagcgcgagctcattggccttgtgaaggctgtgcggcactagaggtcgtatgtctgggaccggccagtggagatagaagattgggtccctaatgatttctcccctactagaatactgcaacagaacctttgaatcttttagtcctgaacaagttgtgcaggctagtttcgaaatgcaacaagggaccacaatatcgatgatacagctaggcatacatcaaagaagtttctaattcgttatcactcctcagatttgttgagactttattaggccggcgacgtgttcttacaaaaataacggctggcaatagcaaagagaaagctaaagcacagaggcaagcagtaaattctatttgccaggtaatatagcattctcacatagttttagatggttgattttattgattatatgattaatatgcatgtgtttccagggttctgctgctgatattattaaggtggctatggttagagttcattcaataattactaacagaactagtgcaactgattccacagatgaagttacaaggaaattttcagaacttggtggccagtgtcaccttattttgcaggtgttttaagacttgcattgcatgatacttattttcttttgacttttgctcagtttggctctaaatatggatgaatgcaactatatatttttcatttgtaggtgcatgatgagttggtattagaagttgatccgtgcatggtagcacaggctggaaggttgttacagatatgtatggaagaagcagcttcactattgggtatcagttttaatctaaacttcgatagttatcttatgttcagtctttgggagcatcttgaaaaggtctttaaaatttacctgctaaactaatagttatgccaagtgaacaaaatgaataggaagttctatttctgccgttctccaatagttaggttcttaaaactaacaacctgggcaggagggtatggggggagcacgcaaaaactgcggaggaggaggcacaaatagtagatatgacnnnnnnnnnnnnnnnnnnnnnnnnnnnnnnnnnnnnnnnnnnnnnnnnnnnnnnnnnnnnnnnnnnnnnnnnnnnnnnnnnnnnnnnnnnnnnnnnnnnnnnnnnnnnnnnnnnnnnnnnnnnnnnnnnnnnnnnnnnnnnnnnnnnnnnnnnnnnnnnnnnnnnnnnnnnnnnnnnnnnnnnnnnnnnnnnnnnnnnnnnnnnnnnnnnnnnnnnnnnnnnnnnnnnnnnnnnnnnnnnnnnnnnnnnnnnnnnnnnnnnnnnnnnnnnnnnnnnnnnnnnnnnnnnnnnnnnnnnnnnnnnnnnnnnnnnnnnnnnnnnnnnnnnnnnnnnnnnnnnnnnnnnnnnnnnnnnnnnnnnnnnnnnnnnnnnnnnnnnnnnnnnnnnnnnnnnnnnnnnnnnnnnnnnnnnnnnnnnnnnnnnnnnnnnnnnnnnnnnnnnnnnnnncccccccccccccccaaaaaaaaaccaaaaaaagggagctgttctaagaagcccatggagatgctctaaccaaggtaaaactgaattggtgtttgcttttatttcagtacctttgcgcacaaagataaaggtgggaaaaacttggggttcactagaaccattctatcctgagccttgttgatgcaaatggttaatgtcagttggatgccaatgtttcacgacatgcaaggtcctggaagaaggctgaacaatttccaatatgccccacagggaccttggtaaatcctactcttttttatagaagattcaccccctgcagagttaatctcatgaggcctgctatttgccactatcgtttcttgttctgcattgtccatgtatttaactgatgcataccttgaaccatatatgaccatatatccgtgtgtggctttgctaatcttgtattttgaatttagtttacattttcatcttcacggtctctttgaaacttcaaatgaatcaggtgattctgtctggtgttcttcggtagaaccttcattgctatgtctacagtcttctgtcattgctgaccgtatgtgaaatcaacgcaacagcgaccagctccattactgaggatttgctatggactggtgattatcattatgattccatgtggcatgcaagaagcatatatatatatatcaccaatagatgctgttaaagggtttaaggtgtatttgaaaggtcttcctagttatactgcgaatcttttagataaacccttaagaaattggagggcctagtatatggtgatttttcttttgctaggtccagcgctaaaaaaccgattatggggtttattcaaagatgaaatttcatcctgtaactacaggttcaaggtgtatttggtttgatggatatcactatggacaagcgatggttggtttttgtacaagttggatgttgataaaaatgttggtatccatgccacacaaaaaaagcctaaccagcacccatattttgtaatccttgtcaagtatgttatatggtttacttgatagctctagcgaggctatccagtacctcaccttcaccctcatatttgtaatccttgtccacataattattagtatgttatatggttatttagtaattacgatggaaatatta

SEQ ID NO: 41 - DNA, 145 bp, Artificial Sequence
  marker ma61227s11
gagtttcaactcttagtttggttctttgcaggagttagatgataatgtagcttccatgaagyaatgcatcaatcaccatggtggctcagaggctgtggaggtttagttatgcctgaacaagtcaaacctggaaccgtttctttgt

SEQ ID NO: 42 - DNA, 94 bp, Artificial Sequence
  synthetic oligo simulating C85T mutation of pol theta gene of Zea mays
cttccggaaattccctctggcaatggcgtcgggctcgtctcgcccccaaatcgactaggtaaaaccctaacctagttcctcgcctattcacttc

SEQ ID NO: 43 - DNA, 92 bp, Artificial Sequence
  synthetic oligo simulating C221T mutation of pol theta gene of Zea mays
atctcagttcttcccggccaagaagcggaggccctcgtcgcggaagggcgagtcgccgtgacccgggacgcagcatgagagccccggcggcg

SEQ ID NO: 44 - DNA, 29 bp, Artificial Sequence
  common primer for marker BvEPSPS T102I or marker BvEPSPS P106S
gtttcctgttggaaaagatgggaaagaaa

SEQ ID NO: 45 - DNA, 78 bp, Artificial Sequence
  reverse sequence of SEQ ID NO: 19
cagcaactgcagctgtcaatgagcgcattgctgttcctgcatttccaagaaaaagttcaatttctttcccatcttttc

SEQ ID NO: 46 - DNA, 78 bp, Artificial Sequence
  reverse sequence of SEQ ID NO: 20
gctgtcaatgggcgcattgctattcctgcatttccaagaaaaagttcaatttctttcccatcttttccaacaggaaac

SEQ ID NO: 47 - DNA, 19 bp, Artificial Sequence
  common primer for marker ma61227s02
gggctcgtctcgcccccaa

SEQ ID NO: 48 - DNA, 19 bp, Artificial Sequence
  common primer for marker ma61227s03
ggaggccctcgtcgcggaa

SEQ ID NO: 49 - DNA, 94 bp, Artificial Sequence
  reverse sequence of SEQ ID NO: 42
gaagtgaataggcgaggaactaggttagggttttacctagtcgatttgggggcgagacgagcccgacgccattgccagagggaatttccggaag

SEQ ID NO: 50 - DNA, 92 bp, Artificial Sequence
  reverse sequence of SEQ ID NO: 43
cgccgccggggctctcatgctgcgtcccgggtcacggcgactcgcccttccgcgacgagggcctccgcttcttggccgggaagaactgagat

SEQ ID NO: 51 - DNA, 11 bp, Artificial Sequence
  fragment of SEQ ID NO: 19
tgcgctcattg

SEQ ID NO: 52 - DNA, 11 bp, Artificial Sequence
  fragment of SEQ ID NO: 20
aggaatagcaa

SEQ ID NO: 53 - DNA, 11 bp, Artificial Sequence
  fragment of SEQ ID NO: 42
tcgactaggta

SEQ ID NO: 54 - DNA, 11 bp, Artificial Sequence
  fragment of SEQ ID NO: 43
cgccgtgaccc

1. Method for identifying a desired allelic variation in a population or for selecting an individuum comprising a desired allelic variation, comprising:
providing a synthetic oligonucleotide comprising said desired allelic variation;
providing an assay suitable for detecting said desired allelic variation;
optimizing or validating said assay to ensure that the assay discriminates between said desired allelic variation and a different allelic variation with said synthetic oligonucleotide as a template;
screening said population for the presence of said desired allelic variation with said optimized or validated detection assay; and
optionally selecting an individual comprising said desired allelic variation.

2. Method for generating an individual comprising a (desired) allelic variation in a population, comprising:
providing a population;
mutagenizing said population;
providing one or more synthetic oligonucleotide comprising said (desired) allelic variation;
providing an assay suitable for detecting said (desired) allelic variation;
optimizing or validating said assay to ensure that the assay detects said (desired) allelic variation or discriminates between said (desired) allelic variation and a different allelic variation with said synthetic oligonucleotide(s) as a template;
screening said mutagenized population for the presence of said (desired) allelic variation with said optimized or validated detection assay; and
selecting an individuum comprising said (desired) allelic variation; optionally propagating said individuum.

3. The method according to claim 1, wherein said assay is a hybridization-based assay or a PCR-based assay.

4. The method according to claim 1, wherein optimizing said assay comprises comparing multiple primers or probes and/or the optimized assay comprises primers or probes which best discriminate between said desired allelic variation and said other allelic variation.

5. The method according to claim 1, wherein said synthetic oligonucleotide has a length of between 50 and 500 .

6. The method according to claim 1, wherein said synthetic oligonucleotide comprising said desired allelic variation is combined with one or more additional synthetic oligonucleotides comprising a different allelic variation.

7. The method according to claim 1, wherein said synthetic oligonucleotide is spiked in genomic DNA.

8. The method according to claim 1, wherein said population is mutagenized.

9. The method according to claim 1, wherein said allelic variation is a point mutation, a nonsense mutation, a knockout mutation, or a SNP.

10. The method according to claim 1, wherein said population is a population of plants or plant parts.

11. The method according to claim 1, wherein:
said population is a population of sugar beets
said synthetic oligonucleotide comprises the sequence of SEQ ID NO: 19 or 20, or a fragment thereof comprising the sequence of SEQ ID NO: 51 or SEQ ID NO: 52.

12. The method according to claim 1, wherein:
said population is a population of maize
said synthetic oligonucleotide comprises the sequence of SEQ ID NO: 42 or 43, or a fragment thereof comprising the sequence of SEQ ID NO: 53 or SEQ ID NO: 54.

13. A synthetic oligonucleotide suitable for use in the method according to claim 1.

14. A method of using a synthetic oligonucleotide comprising a desired allelic variation for optimizing or validating an assay for detecting said allelic variation in a population.

15. A plant selected by the method according to claim 1 or a part, seed or progeny of the plant, wherein the plant, the part, seed or progeny thereof exhibit the desired allelic variation.

16. The method according to claim 3, wherein said assay is a KASP assay or microarray.

17. The method according to claim 5, wherein said synthetic oligonucleotide has a length of between 80 and 200 nucleotides.

18. The method according to claim 7, wherein said genomic DNA comprises wild type genomic DNA from the same species as the population.

19. The method according to claim 8, wherein said mutagenesis is random mutagenesis such as ENU or EMS based mutagenesis.

20. The method according to claim 10, wherein said plant part is a plant organ or plant cell.

21. The method according to claim 18, wherein the plant part is a plant seed.

22. The synthetic oligonucleotide according to claim 13, wherein said oligonucleotide comprises the sequence of SEQ ID NO: 19 or 20, or a fragment thereof comprising the sequence of SEQ ID NO: 51 or SEQ ID NO: 52, or wherein said oligonucleotide comprises the sequence of SEQ ID NO: 42 or 43, or a fragment thereof comprising the sequence of SEQ ID NO: 53 or SEQ ID NO: 54.
